United States Patent Application Publication US 2012/0309003 A1 - sequence listing, part 3

SEQ ID NO: 472 - DNA, 82988 bp, Escherichia coli
  modified_base (82979)..(82979): a, c, t, g, unknown or other
tttagagcaacgagacacggcaatgttgcaccgtttgctgcatgatattgaaaaaaatatcaccaaataaaaaacgccttagtaagtatttttcagcttttcattctgactgcaacgggcaatatgtctctgtgtggattaaaaaaagagtgtctgatagcagcttctgaactggttacctgccgtgagtaaattaaaattttattgacttaggtcactaaatactttaaccaatataggcatagcgcacagacagataaaaattacagagtacacaacatccatgaaacgcattagcaccaccattaccaccaccatcaccattaccacaggtaacggtgcgggctgacgcgtacaggaaacacagaaaaaagcccgcacctgacagtgcgggctttttttcgaccaaaggtaacgaggtaacaaccatgcgagtgttgaagttcggcggtacatcagtggcaaatgcagaacgttttctgcgtgttgccgatattctggaaagcaatgccaggcaggggcaggtggccaccgtcctctctgcccccgccaaaatcaccaaccacctggtggcgatgattgaaaaaaccattagcggccaggatgctttacccaatatcagcgatgccgaacgtatttttgccgaacttttgacgggactcgccgccgcccagccggggttcccgctggcgcaattgaaaactttcgtcgatcaggaatttgcccaaataaaacatgtcctgcatggcattagtttgttggggcagtgcccggatagcatcaacgctgcgctgatttgccgtggcgagaaaatgtcgatcgccattatggccggcgtgttagaagcgcgtggtcacaacgttaccgttatcgatccggtcgaaaaactgctggcagtggggcattacctcgaatctaccgtcgatattgctgagtccacccgccgtattgcggcaagccgcattccggctgatcacatggtgttgatggcaggtttcaccgccggtaatgaaaaaggcgaactggtggtacttggacgcaacggttccgactactccgcggcggtgctggctgcctgtttacgcgccgattgttgcgagatttggacggacgttgacggggtctatacctgcgacccgcgtcaggtgcccgatgcgaggttgttgaagtcgatgtcctaccaggaagcgatggagctttcctacttcggcgctaaagttcttcacccccgcaccattacccccatcgcccagttccagatcccttgcctgattaaaaataccggaaatcctcaagcaccaggtacgctcattggtgccagtcgtgatgaagacgaattaccggtcaagggcatttccaatctgaataacatggcaatgttcagcgtttccggcccggggatgaaaggaatggtcggcatggcggcgcgcgtctttgccgcgatgtcacgcgcccgtatttccgtggtgctgattacgcaatcatcttccgaatacagtatcagtttctgcgttccacaaagcgactgtgtgcgagctgaacgggcaatgcaggaagagttctacctggaactgaaagaaggcttactggagccgctggcggtgacggaacggctggccattatctcggtggtaggtgatggtatgcgcaccttgcgtgggatctcggcgaaattctttgccgcgctggcccgcgccaatatcaacattgtcgccattgctcagggatcttctgaacgctcaatctctgtcgtggtaaataacgatgatgcgaccactggcgtgcgcgttactcatcagatgctgttcaataccgatcaggttatcgaagtgtttgtgattggcgtcggtggcgttggcggtgcgctgctggagcaactgaagcgtcaacaaagctggctgaagaataaacatatcgacttacgtgtctgcggtgttgccaactcgaaggcactgctcaccaatgtgcatggcctaaatctggaaaactggcaggaagaactggcgcaagccaaagagccgtttaatctcgggcgcttaattcgcctcgtgaaagaatatcatctgctgaacccggtcattgttgactgcacctccagccaggcagtggcggatcaatatgccgacttcctgcgcgaaggtttccacgttgtcacgccgaacaaaaaggccaacacctcgtcgatggattactaccatctgttgcgtcatgcggcggaaaaatcgcggcgtaaattcctctatgacaccaacgttggggctggattaccggttattgagaacctgcaaaatctgctcaatgctggtgatgaattgatgaagttctccggcattctttcaggttcgctttcttatatcttcggcaagttagacgaaggcatgagtttctccgaggcgactactctggcgcgggaaatgggttataccgaaccggatccgcgagatgatctttctggtatggatgtagcgcgtaagctattgattctcgctcgtgaaacgggacgtgaactggagctggcggatattgaaattgaacctgtgctgcccgcagagtttaacgctgagggtgatgttgccgcttttatggcgaatctgtcacagctcgacgatctctttgccgcgcgcgtggcgaaggcccgtgatgaaggaaaagttttgcgctatgttggcaatattgatgaagatggtgcctgccgcgtgaagattgccgaagtggatggtaatgatccgctgttcaaagtgaaaaatggcgaaaacgccctggccttttatagccactattatcagccgctgccgttggtgctgcgcggatatggtgcgggcaatgacgttacagctgccggtgtctttgccgatctgctacgtaccctctcatggaagttaggagtctgacatggttaaagtttatgccccggcttccagtgccaatatgagcgtcgggtttgatgtgctcggggcggcggtgacacctgttgatggtgcattgctcggagatgtagtcacggttgaggcggcagagacattcagtctcaacaacctcggacgctttgccgataagctgccgtcagaaccacgggaaaatatcgtttatcagtgctgggagcgtttttgccaggagcttggcaagcaaattccagtggcgatgactctggaaaagaatatgccaatcggttcgggcttaggctccagcgcctgttcggtggtcgcggcgctgatggcgatgaatgaacactgtggcaagccgcttaatgacactcgtttgctggctttgatgggcgagctggaaggacgaatctccggcagcattcattacgacaacgtggcaccgtgttttcttggtggtatgcagttgatgatcgaagaaaacgacatcatcagccagcaagtgccagggtttgatgagtggctgtgggtgctggcgtatccggggattaaagtctcgacggcagaagccagggctattttaccggcgcagtatcgccgccaggattgcattgcgcacgggcgacatctggctggcttcattcacgcctgctattcccgtcagcctgagcttgccgcgaagctgatgaaagatgttatcgctgaaccctaccgtgaacggttactgcctggcttccggcaggcgcggcaggcggtcgcggaaatcggcgcggtagcgagcggtatctccggctccggcccgaccttgttcgctctatgtgacaagccggataccgcccagcgcgttgccgactggttgggtaagaactacctgcaaaatcaggaaggttttgttcatatttgccggctggatacggcgggcgcacgagtactggaaaactaaatgaaactctacaatctgaaagatcacaacgagcaggtcagctttgcgcaagccgtaacccaggggttgggcaaaaatcaggggctgttttttccgcatgacctgccggaattcagcctgactgaaattgatgagatgctgaagctggattttgtcacccgcagtgcgaagatcctctcggcgtttattggtgatgaaatcccgcaggaaatcctggaagagcgcgtgcgcgcggcgtttgccttcccggctccggtcgccaatgttgaaagcgatgtcggttgtctggaattgttccacgggccaacgctggcatttaaagatttcggcggtcgctttatggcacaaatgctgacccatattgcgggcgataagccagtgaccattctgaccgcgacctccggtgataccggagcggcagtggctcatgctttctacggtttaccgaatgtgaaagtggttatcctctatccacgaggcaaaatcagtccactgcaagaaaaactgttctgtacgttgggcggcaatatcgaaactgttgccatcgacggcgatttcgatgcctgtcaggcgctggtgaagcaggcgtttgatgatgaagaactgaaagtggcgctggggttaaactcagctaactcgattaacatcagccgtttgctggcgcagatttgctactactttgaagctgttgcgcagctgccgcaggaagcgcgcaaccagctggttgtctcggtgccaagcggaaacttcggcgatttgacggcgggtctgctggcgaagtcactcggtctgccggtgaaacgttttattgctgcgaccaacgtgaacgataccgtgccacgtttcctgcacgacggtcagtggtcacccaaagcgactcaggcgacgttatccaacgcgatggacgtgagtcagccgaacaactggccgcgtgtggaagagttgttccgccgcaaaatctggcaactgaaagagctgggttatgcagccgtggatgatgaaaccacgcaacagacaatgcgtgagttaaaagaactgggctacacctcggagccgcacgctgccgtagcgtatcgtgcgctgcgtgaccagttgaatccaggcgaatatggcttgttcctcggcaccgcgcatccggcgaaatttaaagagagcgtggaagcgattctcggtgaaacgttggatctgccaaaagagctggcagaacgtgctgatttacccttgctttcacataatctgcccgccgattttgctgcgttgcgtaaattgatgatgaatcatcagtaaaatctattcattatctcaatcaggccgggtttgcttttatgcagcccggcttttttatgaagaaattatggagaaaaacgacagggaaaaaggagaaattctcaataaatgcggtaacttagagattaggattgcggagaataacaaccgtcgttctcatcgcgtaatctccggatatcgacccataacgggcaatgataaaaggagtaacctgtgaaaaagatgcaatctatcgtactcgcactttccctggttctggtcgctcccatggcagcacaggctgcggaaattacgttagtcccgtcagtaaaattacagataggcgatcgtgataatcgtggctattactgggatggaggtcactggcgcgaccacggctggtggaaacaacattatgaatggcgaggcaatcgctggcacccacacggaccgccgccaccgccgcgccaccataagaaagctcctcatgatcatcacggcggtcatggtccaggcaaacatcaccgctaaatgacaaatgccgggtaacaatccggcattcagcgcctgatgcgacgctggcgcgtcttatcaggcctacgtgaattctgcaatatattgaatctgcatgcttttgtaggccggataaggcgttcacgccgcatccggcattgactacaaacttaacgctgctcgtagcgtttaaacaccagttcgccattgctggaggaatcttcatcaaagaagtaaccttcgctattaaaaccagtcagttgctctggtttggtcagccgattttcaataataaaacgactcatcagaccgcgtgctttcttagcgtagaagctgattatcttaaatttgccgttcttctcatcgaggaacaccggcttgataatctcggcattcaatttcttcggcttcaccgatttaaaatactcatctgacgccagattaatcaccacattatcgccttgtgctgcgagcgcctcgttcagcttgttggtgatgatatctccccagaattgatacagatctttccctcgggcattctcaagacggatccccatttccagacgataaggctgcattaaatcgagcgggcgcagtacgccatacaagccggaaagcattcgcaaatgctgttgggcaaaatcgaaatcgtcttcgctgaaggtttcggcctgcaagccggtgtagacatcacctttaaacgccagaatcgcctggcgggcattctccggcgtgaaatctggctgccagtcatgaaagcgagcggcgttgatacccgccagtttgtcgctgatgcgcatcagcgtgctaatctgcggaggcgtcagtttccgcgcttcatggatcaactgctgggaattgtctaacagctccggcagcgtatagcgcgtggtggtcaacgggctttggtaatcaagcgttttcgcaggtgaaataagaatcagcatatccagtccttgcaggaaatttatgccgactttagcaaaaaaagagaatgagttgatcgatagttgtgattactcctgcgaaacatcatcccacgcgtccggagaaagctggcgaccgatatccggataacgcaacggatcaaacaccgggcgcacgccgagtttacgctggcgtagataatcactggcaatggtatgaaccacaggcgagagcagtaaaatggcggtcaaattggtaatagccatgcaggccattatgatatctgccagttgccacatcagcggaaggcttagcaaggtgccgccgatgaccgttgcgaaggtgcagatccgcaaacaccagatcgctttagggttgttcaggcgtaaaaagaagagattgttttcggcataaatgtagttggcaacgatggagctgaaggcaaacagaataaccacgagggtaacaaactcagcaccccaggaacccattagcacccgcatcgccttctggataagctgaataccttccagcggcatgtaggttgtgccgttacccgccagtaatatcagcatggcgcttgccgtacagatgaccagggtgtcgataaaaatgccaatcatctggacaatcccttgcgctgccggatgcggaggccaggacgcagctgccgctgctgcgtttggtgtagaacccattcccgcctcattggaaaacatactgcgctgaaaaccgttagtaatcgcctggcttaaggtatatcccgccgcgccgcctgccgcttcctgccagccaaaagcactctcaaaaatagaccaaatgacgtggggaagttgcccgatattcattacgcaaatcaccaggctggtcagtacccagattatcgccatcaacgggacaaaaccctgcatgagccgggcgacgccatgaagaccgcgagtgattgccagcagagcaaagacagcgagaataatgcctgtcaccagcgggggaaaatcaaaagaaaaactcagggctcgggcaacggcgttcgcctgaactccgctgaaaattatgccgtaggcgatgagcaaaaagacggcgaacagaacgcccatccaacgcatccccagcccgcgcgccatataccatgccggtcctccacgaaactgtccattgacgtcacgttctttataaagttgtgcaagggaacattcggcaaacgaggtcgccatgccgataaacgcggcaacccacatccaaaagacggctccaggtccaccggcggtaatagccagcgcaacgccggccaggttgccgctacccacgcgcgccgcaagactggtacacaatgactgaaatgaggttaaaccgcctggctgtggatgaatgctatttttaagacttttgccaaactggcggatgtagcgaaactgcacaaatccggtgcgaaaagtgaaccaacaacctgcgccgaagagcaggtaaatcattaccgatccccaaaggacgctgttaataaaggagaaaaaatctggcatgcatatccctcttattgccggtcgcgatgactttcctgtgtaaacgttaccaattgtttaagaagtatatacgctacgaggtacttgataacttctgcgtagcatacatgaggttttgtataaaaatggcgggcgatatcaacgcagtgtcagaaatccgaaacagtctcgcctggcgataaccgtcttgtcggcggttgcgctgacgttgcgtcgtgatatcatcagggcagaccggttacatccccctaacaagctgtttaaagagaaatactatcatgacggacaaattgacctcccttcgtcagtacaccaccgtagtggccgacactggggacatcgcggcaatgaagctgtatcaaccgcaggatgccacaaccaacccttctctcattcttaacgcagcgcagattccggaataccgtaagttgattgatgatgctgtcgcctgggcgaaacagcagagcaacgatcgcgcgcagcagatcgtggacgcgaccgacaaactggcagtaaatattggtctggaaatcctgaaactggttccgggccgtatctcaactgaagttgatgcgcgtctttcctatgacactgaagcgtcaattgcgaaagcaaaacgcctgatcaaactctacaacgatgctggtattagcaacgatcgtattctgatcaaactggcttctacctggcagggtatccgtgctgcagaacagctggaaaaagaaggcatcaactgtaacctgaccctgctgttctccttcgctcaggctcgtgcttgtgcggaagcaggcgtgttcctgatctcgccatttgttggccgtattcttgactggtacaaagcgaatactgataagaaagagtacgctccggcagaagatccgggcgtggtttctgtatctgaaatctaccagtactacaaagagcacggttatgaaaccgtggttatgggcgcaagcttccgtaacatcggcgaaattctggaactggcaggctgcgaccgtcttaccatcgcacctacactgctgaaagagctggcggagagcgaaggggctatcgaacgtaaactgtcttacaccggcgaagtgaaagcgcgtccggcgcgtatcactgagtccgagttcctgtggcagcacaaccaggatccaatggcagtagataaactggcggaaggtatccgtaagtttgctattgaccaggaaaaactggaaaaaatgatcggcgatctgctgtaatcattcttagcgtgaccgggaagtcggtcacgctacctcttctgaagcctgtctgtcactcccttcgcagtgtatcattctgtttaacgagactgtttaaacggaaaaatcttgatgaatactttacgtattggcttagtttccatctctgatcgcgcatccagcggcgtttatcaggataaaggcatccctgcgctggaagaatggctgacatcggcgctaaccacgccgtttgaactggaaacccgcttaatccccgatgagcaggcgatcatcgagcaaacgttgtgtgagctagtggatgaaatgagttgccatctggtgctcaccacgggcggaactggcccggcgcgtcgtgacgtaacgcccgatgcgacgctggcagtagcggaccgcgagatgcctggctttggtgaacagatgcgccagataagcctgcattttgtaccaactgcgatcctttcgcgtcaggttggtgtgattcgcaaacaggcgctgatccttaacttacccggtcagccgaagtctattaaagagacgctggaaggtgtgaaggacgctgcgggtaacgttgtggtacacggtatttttgccagcgtaccgtactgcattcagttgctggaagggccatacgttgaaacggcaccggaagtggttgcagcattcagaccgaagagtgcaagacgcgacgttagcgaataaaaaaatccccccgagcggggggatctcaaaacaattagtgggattcaccaatcggcagaacggtgcgaccaaactgctcgttcagtacttcacccatcgccagatagattgcgctggcaccgcagatcagcccaatccagccggcaaagtggatgattgcggcgttaccggcaatgttaccgatcgccagcagggcaaacagcacggtcaggctaaagaaaacgaattgcagaacgcgtgcgcctttcagcgtgccgaagaacataaacagcgtaaatacgccccacagacccaggtagacaccaaggaactgtgcatttggcgcatcggtcagacccagtttcggcatcagcagaatcgcaaccagcgtcagccagaaagaaccgtaagaggtgaatgcggttaaaccgaaagtgttgccttttttgtactccagcagaccagcaaaaatttgcgcgatgccgccgtagaaaatgcccatggcaagaataataccgtccagagcgaaataacccacgttgtgcaggttaagcagaatggtggtcatgccgaagcccatcaggcccagcggtgccggattagccaacttagtgttgcccataattcctcaaaaatcatcatcgaatgaatggtgaaataatttccctgaataactgtagtgttttcagggcgcggcataataatcagccagtggggcagtgtctacgatcttttgaggggaaaatgaaaattttccccggtttccggtatcagacctgagtggcgctaaccatccggcgcaggcaggcgatttgcagtacggctggaatcgtcacgcgataggcgctgccgctgaccgctttaaccccatttagtgccgcacctacagggcctcccagccccgcgccgcgcagcaaaccatgcccaagtacgctcattgctgcgtgggtgcgtaaaatgcgggtcagttggctggaaagcaaatgcgacacgccttttgccaataatttgtctttcatcagcagcggcagcagctcttccagctcattcaccctggcatcgatcgcgtgcagaaactcctgcttatgttcctcgtccatattcttccaggtgttacgcagaaattgttccagtaactgttgctcaatctcaaacgtagacatctctttgtcggctttcagcttcaatcgttttgaaacatcgagcaaaatggcccgatacaatttaccgtgtccgcgcagtttgttggcgatactatcgccaccaaaatgctgtaattctccagcaatcagctgccagttgcggcgatgttgctcgggatgcccttccatcgatttaaacagttcgttgcgcatcagtacgctggagaggcgagttttgcctttttcattatgggtgagcaatcgggcgaaatttgccaactgttcctcactgcaatgctggagaaaatccagatctgaatcattcaggtaattaacattcattttttgtggcttctatattctggcgttagtcgtcgccgataattttcagcgtggccatatccgatgagttcaccgtatgaccggaaaaggtgatttttgagacgcagcgtttattgtcgttatcgctgttaatgttgatccagtcagtggtttgcccttcttttatttctgaaggaatattcaggctctgactggcgctacgggcggctttgaaataaaccgatgcaccgcttaactgtaaatcgccatggtcggcagagagttgtatgcgtttaacaattcggcaaacaggaagtttcaacgccagatcgttggtttcgttacgcggcattgcaatgacgccgaggattttatggtcgtttgcctgcgccgtgcagcacagcatcagactaatcgccaggctggcggaaatcgtaaaaacggatttcataaggattctcttagtggggagaggtagggggatggatacccactagtttactgctgataaagagaagattcaggtgcgtaatgttttctttttattacaattttttgatgaatgtcttggctgcgattcattctttatatgaataaaattgctgtcagtttcacgtcttgtcctgctatatcgcgaaatttctgcgcaaaagcacaaaaaatttttgcatctcccccttgatgacgtgggttacgaccccatttagtagtcaaccgcagtgagtgagtctgcaaaaaatgaaattgggcagttgaaaccagacgtttcgcccctattacagactcacaaccacatgatgaccgaatatatagtggagacgtttagatgggtaaaataattggtatcgacctgggtactaccaactcttgtgtagcgattatggatggcaccactcctcgcgtgctggagaacgccgaaggcgatcgcaccacgccttctatcattgcctatacccaggatggtgaaactctggttggtcagccggctaaacgtcaggcagtgacgaacccgcaaaacaccctgtttgcgattaaacgcctgattggccgccgcttccaggacgaagaagtacagcgtgatgtttccatcatgccgttcaaaattattgctgctgataacggcgacgcatgggtcgaagttaaaggccagaaaatggcaccgccgcagatctctgctgaagtgctgaaaaaaatgaagaaaaccgctgaagattacttgggtgaaccggtaactgaagctgttatcaccgtaccggcatactttaacgatgctcagcgtcaggcaaccaaagacgcaggccgtatcgctggtctggaagtaaaacgtatcatcaacgaaccgaccgcagctgcgctggcttacggtctggacaaaggtactggcaaccgtactatcgcggtttatgacctgggtggtggtactttcgatatttctattatcgaaatcgacgaagttgacggcgaaaaaaccttcgaagttctggctaccaacggtgatacccacctgggtggtgaagacttcgacagccgtctgatcaactacctggttgaagaattcaagaaagatcagggcattgacctgcgcaacgatccgctggcaatgcagcgcctgaaagaagcggcagaaaaagcgaaaatcgaactgtcttccgctcagcagaccgacgttaacctgccgtacatcactgcagatgcgaccggtccgaaacacatgaacatcaaagtgactcgtgcgaaactggaaagcctggttgaagatctggtaaaccgttccattgagccgctgaaagttgcactgcaggacgctggcctgtccgtatctgatatcgacgacgttatcctcgttggtggtcagactcgtatgccaatggttcagaagaaagttgctgagttctttggtaaagagccgcgtaaagacgttaacccggacgaagctgtagcaatcggtgctgctgttcagggtggtgttctgactggtgacgtgaaagacgtactgctgctggacgttaccccgctgtctctgggtatcgaaaccatgggcggtgtgatgacgacgctgatcgcgaaaaataccactatcccgaccaagcacagccaggtgttctctaccgctgaagacaaccagtctgcggtaaccatccatgtgctgcagggtgaacgtaaacgtgcggctgataacaaatctctgggtcagttcaacctggatggtatcaacccggcaccgcgcggcatgccgcagatcgaagttaccttcgatatcgatgctgacggtatcctgcacgtttccgcgaaagataaaaacagcggtaaagagcagaagatcaccatcaaggcttcttctggtctgaacgaagatgaaatccagaaaatggtacgcgacgcagaagctaacgccgaagctgaccgtaagtttgaagagctggtacagactcgcaaccagggcgaccatctgctgcacagcacccgtaagcaggttgaagaagcaggcgacaaactgccggctgacgacaaaactgctatcgagtctgcactgactgcactggaaactgctctgaaaggtgaagacaaagccgctatcgaagcgaaaatgcaggagctggcacaggtttcccagaaactgatggaaatcgcccagcagcaacatgcccagcagcagactgccggtgctgatgcttctgcaaacaacgcgaaagatgacgatgttgtcgacgctgaatttgaagaagtcaaagacaaaaaataatcgccctataaacgggtaattatactgacacgggcgaaggggaatttcctctccgcccgtgcattcatctaggggcaatttaaaaaagatggctaagcaagattattacgagattttaggcgtttccaaaacagcggaagagcgtgaaatcaaaaaggcctacaaacgcctggccatgaaataccacccggaccgtaaccagggtgacaaagaggccgaggcgaaatttaaagagatcaaggaagcttatgaagttctgaccgactcgcaaaaacgtgcggcatacgatcagtatggtcatgctgcgtttgagcaaggtggtatgggcggcggcggttttggcggcggcgcagacttcagcgatatttttggtgacgttttcggcgatatttttggcggcggacgtggtcgtcaacgtgcggcgcgcggtgctgatttacgctataacatggagctcaccctcgaagaagctgtacgtggcgtgaccaaagagatccgcattccgactctggaagagtgtgacgtttgccacggtagcggtgcaaaaccaggtacacagccgcagacctgtccgacctgtcatggttcaggtcaggtgcagatgcgtcagggattcttcgctgtacagcagacctgtccacactgtcagggccgcggtacgctgatcaaagatccgtgcaacaaatgtcatggtcatggtcgtgttgagcgcagcaaaacgctgtccgttaaaatcccggcaggggtggacactggagaccgcatccgtcttgcgggcgaaggtgaagcgggcgagcatggcgcaccggcaggcgatctgtacgttcaggttcaggttaaacagcacccgattttcgagcgtgaaggcaacaacctctattgcgaagtcccgatcaacttcgctatggcggcgctgggtggcgaaatcgaagtaccgacccttgatggtcgcgtcaaactgaaagtgcctggcgaaacccagaccggtaagcttttccgtatgcgcggtaaaggcgtcaagtctgtccgcggtggcgcacagggtgatttgctgtgccgcgttgtcgtcgaaacaccggtaggcctgaacgagaagcagaaacagctgctgcaagagctgcaagaaagcttcggtggcccaaccggtgagcacaacagcccgcgctcaaagagcttctttgatggtgtgaagaagttttttgacgacctgacccgctaacctccccaaaagcctgcccgtgggcaggcctgggtaaaaatagggtgcgttgaagatatgcgagcacctgtaaagtggcggggatcactccccgccgttgctcttactcggattcgtaagccgtgaaaacagcaacctccgtctggccagttcgggtgtgaacctcacagaggtcttttctcgttaccagcgccgccactacggcggtgatacagatgacgatcagggcgacaatcatcgccttatgctgcttcattgctctcttctccttgaccttacggtcagtaagaggcactctacatgtgttcagcatatagggggcctcgggttgatggtaaaatatcactcggggcttttctctatctgccgttcagctaatgcctgagacagacagcctcaagcacccgccgctattatatcgctctctttaacccattctgttttatcgattctaatcctgaagacgcctcgcatttttatggcgtaattttttaatgatttaattatttaactttaatttatctcttcatcgcaattattgacgacaagctggattattttgaaatattggcctaacaaacatcgccgactgacaacaaattaattattacttttcctaattaatctctcagaaatcctcaccttaagctatgattatctgggcttagggtcactcgtgagcgcttacagccgtcaaaaactcatctcaccgctgatggcgcaaattcttcaatggatcgtaaaaaacgagttattcctacactataatctgattttaacgatgatttgtgcggggtaaaatagtaaaaacgatctattcacctgaaagagaaataaaaagtgaaacatctgcatcgattctttagcagtgatgcctcgggaggcattattcttatcattgccgctatcctggcgatgattatggccaatagcggcgcaaccagtggatggtatcacgactttctggagacgccggttcagctccgggttggttcactcgaaatcaacaaaaacatgctgttatggataaatgacgcgctgatggcggtatttttcctgttagtcggtctggaagttaaacgtgaactgatgcaaggatcgctagccagcttacgccaggccgcatttccagttatcgccgctattggtgggatgattgttccggcattactctatctggcctttaactatgccgatccgattacccgcgaagggtgggcgatcccggcggctactgacattgcctttgcacttggtgtgctggcgctgttgggaagtcgtgttccgttagcgctgaagatctttttgatggctctggctattatcgacgatcttggggccatcattatcatcgcattgttctacactaatgacttatcgatggcctctcttggcgtcgcggctgtagcaattgcggtactcgcggtattgaatctgtgtggtgtacgccgcacgggcgtctatattctggttggcgtagtgttgtggactgcggtgttgaaatcgggggttcacgcaaccctggcgggggtaattgtcggcttctttattcctttgaaagagaagcatgggcgttctccagcgaagcgactggagcatgtgttacacccgtgggtggcgtatctgattttgccgctgtttgcatttgctaatgctggcgtttcactgcaaggtgtcacgctggatggcttgacctccattctgccattggggatcatcgctggcttgctgattggcaaaccgctggggattagtctgttctgctggttggcgctgcgtttgaaactggcgcatctgcctgagggaacgacttatcagcaaattatggcggtggggatcctgtgcggtatcggttttactatgtctatctttattgccagcctggcctttggtagcgtagatccagaactgattaactgggcgaaactcggtatcctggtcggttctatctcttcggcggtaattggatacagctggttacgcgttcgtttgcgtccatcagtttgacaggacggtttaccggggagccataaacggctcccttttcattgttatcagggagagaaatgagcatgtctcatatcaattacaaccacttgtattacttctggcatgtctataaagaaggttccgtggttggcgcagcggaggcgctttatttaactccacaaaccattaccggacagattcgagcgctggaagagcgcctgcaaggcaaattatttaaacgcaagggacgtggtctcgaacccagcgagctgggagaactggtctatcgctatgccgataaaatgttcaccttaagccaggaaatgctggatattgtgaactatcgcaaagaatccaatttattgtttgacgttggtgtggctgatgcactttccaaacgcctggtcagtagcgtgctgaatgctgcagtggtagaaggcgagcccattcatcttcgctgcttcgaatccacccacgaaatgctgctggagcaattaagtcagcataaactggatatgatcatttctgactgtccgatagactctacgcagcaggaaggcctgttctccgtgagaattggcgaatgtggcgtgagtttctggtgtacaaatccaccaccagaaaaaccgttcccggcttgtctggaagaacggcgacttttgattcctgggcgacgttcaatgttagggcgcaaattgcttaactggtttaactcccagggattaaacgtagaaatcctcggcgagtttgatgatgccgcgttgatgaaagcttttggtgcgatgcacaatgcaatcttcgttgccccaacgctttatgcatatgacttttatgccgataaaactgtcgtagaaattggtcgcgtcgagaatgtgatggaagagtaccatgctatttttgctgagcggatgattcagcacccggcggtacagcgaatctgcaatacggattattctgcgctttttagtccagcggcgcgttaatcggcacctccccccaaagttaaggtgggggagatagattagttgtacataaccacgattttgactcggctcattatttgcccgcttgagacattatttccatatgtacgcgggcgaataaatagaggaatctgattacttccttcatggggatgctgaaaagagtagtaattgcttttaccatactggatttcattcgtaccatcattggagagttgaaagcctatttgacccgcaccgtcctcactgttttctaactcattttttaatatgctggttcctgactcctgtatcgtcactggttcaaagtaatattcaacatcactgggttcaaaaactaattcaccttgctcgccctggatgcagtcaaatcttatatgatgaaactgataattttcattattgatacgagacagtacaaatcgtccagtgtcgatggattgatcttcaaaaccacaggtcattaaatttacctgtaaaatagtatttaaattataattaaagcggacgctattacaattagtattattccctgtacatgaactcacttcaatttcgaacaacaaaggaaaaggagttccaggaaaaatgtctgcggtgttagaactatctgatacagatgcgatagaatatggaatggtgaaatttatcgcagatagcatttcttctaaattataagatgacttccctggaagctctatttttttaccgtcagattcaaaggggaaattaataatataatgacgacttccgactttaaaccttaaagcgttctgtgttaaaaaatgaactttaatggcgttggttgtctcttgcaagtctgtacactcaatgatatttccggtgttttcaattttttcggcggttagattacctttcatactcagtggcttgagtatatatgttccacgttgttcaccgacattggtcaatgcacagggagcactttgcacaataaaagaatatagactcaaggtgattaataaaagccacttcatagtaaactccttttactggcatatatatgttttgttttcatcgataacgtgttgaaaagtaatagtacagaataagttctgttcatcattgagagcaacttttattccagtgggaatttcatctacgcgaataaaaaggcgactaccctggccaacgactccaatattattttcctggagatccagtacgtcatagccaaaggttaatggcgaaccatcgggacgcagtgcctgtatataccagggcttacgttggtcagttgtaaactgcacataagaaactgctccacggtaaggtgcaataatttgacgattgccctgcaattctgtttcactttcactgtttgctatatcaagtaccagatggttttcacgatgaggtattatcaggtcgtaaacaacctggcctttgctgtttgttcgattgtatttttgtccattaatatgtgcaccttctaacccaggcgcatccagaattgcaaatgtatcggataactggttagtgatattaataccaccgggccagacaactaatccactactaatacttccaccactttgccaggcgtttttagaatgactatagctgccatctattatggcgatgggagttctccagcttaaattcgtaccaagcgaggtatcattattttgttgttgctgattaacatatataccataatttaactgatcatgttcaccggctatgccagtaattccagtattgttggaggaatagccatctttggaaaatgaggtcgaattcgataagttaatttggtgacgtgttttggcaatatcatccccccagtagaaaggaatggagataaacagattaaaacgctcctcttctttattattttcatcataagattggctggcagagaaagtataactaatgtgttgccagttattggagtaactgagttggtaatctttagcatttccacttcgcccccagtaattccgccaaagcgcacttaatgatacatttcccagatttttagataaaggttgcatgatattggcagaaaggctattttttctgctaatatcataaaaatcgtcaaagtcactctgatgatttattttatcattttcgtaaagatggtcgctgaatgtcctgtaatcctgcgaagcataacgccaggcggccacgctaaagtgagtagccgtttgcactagatatttattataggcgacctgatagctcgtaccttcgtgtctggtatcattatttaacttactactcgatcgggcagcgtaaaaagagatggcacccagcggtgtattccaaccatttcccagagttatagcattatagttatcggataaaatcgtacccgattatgtgatcaggttgttattatttagattaatgtttaaaatttttaatttcttgatgtgaagttgatgaaagtttaatattcttaattattcccttctttataagaagagcaaggtgccattattagagtgagagagtaggatgtttcagagtatgcttcagattattttttattcctctgtagtgaattaataatcatcacagttaatttcattctgaaattacttcttttttgagattttttaattttgatgagctatgtttttcataaggaacatacactcgttgatgcttttaaggtattttctcatttctgatgatgttttgtcgtaatcgtgcataaacttattaagttctttatacacatcattatttagctttacattgtcgcgaactaaagtttgtaccaatggtatcaaaatttcgaaacgggacggtttgtcatcaatacttgccagggttttgaatactcctgtgtatctgtaacctaagtgcttattgacaagttgagtggtccatcgaccaggcataatatcttcacagagcaaattttttattctggtattagtgaatgatgctccaaatatgttgctttttttaatgaagagattattaatttctccatttgaaaagatggtgtttgataagtcgctttcaaaacataatatattggatgatacacaaccaaaataatacccatatgaaaggtcgctcttttctattgttatatttgatagcaacattttatgtatattaatattaagggcagtcaaatactggatgttttgctcgttaagttcatgcatctccagagatttattatagggtaataaaagtataaattcctttacattatttccgcagtaagaaaagacaacatcaaatttattggtgattgtgttttcagttgagcagtaagctgatttttttattaatcgactgggtatgcttttaaataaagataattttttacatagttgtgaatatgcaatattgctagttttaaagttctgccacattattccctggttatcatctatcgatgaggaggggattttattgcattgctcattgtatagctcagggaaaatattttttttaataagctttttgatttcctggttaagatgactttttttcttgtctattgcactgtattttgcgttttgtgacgtttcctgatgatcataaaatgactggagatttctgcaggcctcataaaatatttcaggagtatatagctgtgggtatatttcttggttgaagtttgcctttaaaaaattaacgaatttttcatggcattcttggtatatcttaatctcttcagaaagacattcgcttgttctgtcatcaaaaacatccaatctaagtaatgtgatacctttgtgtttaaaaaaataaaattgaactgtatgttctatgagtttacatctataaaaatatgcatctctcagatgagtatattgaaaaaatgatgaaggactggagatggtttaggcaagttatggcttctaaaaaagtcatcaaacaaaattaagaactctgttttatactcgcaaaatacttttactaactcattttgtcttgttttatttattattacatcatctactatatttgatttataaagacaatgtggcgaagttgagataccatttgtcattatcagtccttgaagttgatgaatttttattaatttaatttatgagtgaatgtgactactatcaaaaatagctcattaattttatgaagtagaatataaataggtatttaacctgtgttgattgttgttaattatttacaagatctaataaggagatatttatgaatggttaaagtgtataggaatttaattcaaaaatagagtggtcttaagtttaatacctcaatgtgtatcacaatatccacattctttgtaggggagtctggagattgagtagatattcttgttcagaatgtatcagccgatggttctacgattcttaagccacgaagagttcagaaagtgtaacggcatgtctgcaaaagccagcatcttttgactatctggcaaccggtagtgtgttctctcacgcatcataaaagcagcaggcataaaaaaacccgcttgcgcgggctttttcacaaagcttcagcaaattggcgattaagccagtttgttgatctgtgcagtcaggttagccttatgacgtgcagctttgtttttgtggatcagacctttagcagcctgacggtccacgatcggttgcatttcgttaaatgctttctgtgcagcagctttgtcgccagcttcgatagctgcgtatactttcttgatgaaagtacgcatcatagagcgacggcttgcgttgtgcttacgagccttttcagactgaatggcgcgcttcttagctgatttgatattagccaaggtccaactcccaaatgtgttctatatggacaattcaaaggccgaggaatatgcccttttagccttcttttgtcaatggatttgtgcaaataagcgccgttaatgtgccggcactcgttacgtagtgatggcgcaggattctaccagcttgcggggtgtgaatacagcttttccgcgataaaaattgcagcaggcggtcactttcttcccgtgatttgcgccatggcaatgaaaagccacttctttctgatttcggtactcaatcgccggttaaccttgaccgctgtacaaggtatactcggacgattttcactgttttgagccagacatgaagctgatacgcggcatacataatctcagccaggccccgcaagaagggtgtgtgctgactattggtaatttcgacggcgtgcatcgcggtcatcgcgcgctgttacagggcttgcaggaagaagggcgcaagcgcaacttaccggtgatggtgatgctttttgaacctcaaccactggaactgtttgctaccgataaagccccggcacggctgacccggctgcgggaaaaactgcgttaccttgcagagtgtggcgttgattacgtgctgtgcgtgcgtttcgacaggcgtttcgcggcgttaaccgcgcaaaatttcatcagcgatcttctggtgaagcatttgcgcgtaaaatttcttgccgtaggtgatgatttccgctttggcgctggtcgtgaaggcgatttcttgttattacagaaagctggcatggaatacggcttcgatatcaccagtacgcaaactttttgcgaaggtggcgtgcgtatcagcagcaccgctgtgcgtcaggcgctggcggatgacaatctggctctggcagaaagtttactggggcacccgtttgccatctccgggcgtgtagtccacggtgatgaattagggcgcactataggtttcccgacggcgaatgtaccgctacgccgtcaggtttccccggtgaaaggggtttatgcggtagaagtgctgggcctcggtgaaaagccgttacccggcgtggcaaacattggaacacgcccaacggttgccggtattcgccagcagctggaagtgcatttgttagatgttgcaatggacctttacggtcgccatatacaagtagtgctgcgtaaaaaatacgcaatgagcagcgatttgcgtcgctggacgaactgaaagcgcagattgcgcgtgatgaattaaccgcccgcgaattttttgggctaacaaaaccggcttaagcctgttatgtaatcaaaccgaaacacggaaccgagaatctgatgagtgactataaatcaaccctgaatttgccggaaacagggttcccgatgcgtggcgatctcgccaagcgcgaaccgggaatgctggcgcgttggactgatgatgatctgtacggcatcatccgtgcggctaaaaaaggcaaaaaaaccttcattctgcatgatggccctccttatgcgaatggcagcattcatattggtcactcggttaacaagattctgaaagacattatcgtgaagtccaaagggctttccggttatgactcgccgtatgtgcctggctgagactgccacggcactgccgatcgagctgaaagtagagcaagaatacggtaagccgggtgagaaattcaccgccgccgagttccgcgccaagtgccgcgaatacgcggcgacccaggttgacggtcaacgcaaagactttatccgtctgggcgtgctgggcgactggtcgcacccgtacctgaccatggacttcaaaactgaagccaacatcatccgcgcgctgggcaaaatcatcggcaacggtcacctgcacaaaggcgcgaagccagttcactggtgcgttgactgccgttctgcgctggcggaagcggaagttgagtattacgacaaaacttctccgtccatcgacgttgcttttcaggcggtcgatcaggatgcactgaaagcaaaatttgccgtaagcaacgttaacggcccaatctcgctggtgatctggaccactacgccgtggactctgcctgcgaaccgcgcaatctctattgcacctgatttcgactatgcgctggtgcagatcgacggtcaggccgtgattctggcgaaagatctggttgaaagcgtaatgcagcgtatcggcgtgaccgattacaccattctcggcacggtaaaaggtgcggagcttgagttgctgcgctttacccatccgtttatgggcttcgacgttccggcaatcctcggcgatcacgttaccctggatgccggtaccggtgccgttcacaccgcgcctggccacggcccggacgactatgtgatcggtcagaaatacggcctggaaaccgctaacccggttggcccggacggcacttatctgccgggcacttatccgacgctggatggcgtgaacgtcttcaaagcgaacgacatcgtcgttgcgctgctgcaggaaaaaggcgcgctgctgcacgttgagaaaatgcagcacagctatccgtgctgctggcgtcacaaaacgccgatcatcttccgcgcgacgccgcagtggttcgtcagcatggatcagaaaggtctgcgtgcgcagtcactgaaagagatcaaaggcgtgcagtggatcccggactggggccaggcgcgtatcgagtcgatggttgctaaccgtcctgactggtgtatctcccgtcagcgcacctggggcgtaccgatgtcactgttcgtgcacaaagacacggaagagctgcatccgcgtactctcgaactaatggaagaagtggcaaaacgcgttgaagttgacggcatccaggcgtggtgggatcttgatgcgaaagagatcctcggcgatgaagctgatcagtacgtgaaagtgccggacacattggatgtatggtttgactccggatctacccactcttctgttgttgacgtgcgtccggaatttgccggtcacgcagcggacatgtatctggaaggttctgaccagcaccgtggttggttcatgtcttccctaatgatctccaccgcgatgaaaggcaaagcgccgtatcgtcaggtactgacccacggctttaccgtggatggtcagggtcgcaagatgtctaaatccatcggcaataccgtttcgccgcaggatgtgatgaacaaactgggcgcggatattctgcgtctgtgggtggcatcaaccgactacaccggtgaaatggccgtttctgacgagatcctgaaacgtgctgccgatagctatcgtcgtatccgtaacaccgcgcgcttcctgctggcaaacctgaacggttttgatccagcaaaagatatggtgaaaccggaagagatggtggtactggatcgctgggccgtaggttgtgcgaaagcggcacaggaagacatcctcaaggcgtacgaagcatacgatttccacgaagtggtacagcgtctgatgcgcttctgctccgttgagatgggttccttctacctcgacatcatcaaagaccgtcagtacaccgccaaagcggacagtgtggcgcgtcgtagctgccagactgcgctgtatcacatcgcagaagcgctggtgcgctggatggcaccaatcctctccttcaccgctgatgaagtgtggggctacctgccgggcgaacgtgaaaaatacgtcttcaccggtgagtggtacgaaggcctgtttggcctggcagacagtgaagcgatgaacgatgcgttctgggacgagctgttgaaagtgcgtggcgaagtgaacaaagtcattgagcaagcgcgtgccgacaagaaagtgggtggctcgctggaagcggcagtaaccttgtatgcagaaccggaactgtcggcgaaactgaccgcgctgggcgatgaattacgatttgtcctgttgacctccggcgctaccgttgcagactataacgacgcacctgctgatgctcagcagagcgaagtactcaaagggctgaaagtcgcgttgagtaaagccgaaggtgagaagtgcccacgctgctggcactacacccaggatgtcggcaaggtggcggaacacgcagaaatctgcggccgctgtgtcagcaacgtcgccggtgacggtgaaaaacgtaagtttgcctgatgagtcaatcgatctgttcaacagggctacgctggctgtggctggtggtagtcgtgctgattatcgatctgggcagcaaatacctgatcctccagaactttgctctgggggatacggtcccgctgttcccgtcgcttaatctgcattatgcgcgtaactatggcgcggcgtttagtttccttgccgatagcggcggctggcagcgttggttctttgccggtattgcgattggtattagcgtgatcctggcagtgatgatgtatcgctcgaaggccacgcagaagctaaacaatatcgcttatgcgctgattattggcggcgcgctgggcaacctgttcgaccgcctgtggcacggcttcgttgtcgatatgatcgacttctacgtcggcgactggcacttcgccaccttcaaccttgccgatactgccatttgtgtcggtgcggcactgattgtgctggaaggttttttgccttctaaagcgaaaaaacaataataaaccctgccggataaggcctacagattgctgcgaaatcgtaggccgcatccggcaaaaatcctcaaaatataagagcaaacctgcatgtctgaatctgtacagagcaatagcgccgtcctggtgcacttcacgctaaaactcgacgatggcaccaccgccgagtctacccgcaacaacggtaaaccggcgctgttccgcctgggtgatgcttctctttctgaagggctggagcaacacctgttggggctgaaagtgggcgataaaaccaccttctcgttggagccagatgcggcgtttggcgtgccgtcaccggacctgattcagtacttctcccgccgtgaatttatggatgcaggcgagccagaaattggcgcaatcatgctttttaccgcaatggatggcagtgagatgcctggcgtgatccgcgaaattaacggcgactccattaccgttgatttcaaccatccgctggccgggcagaccgttcattttgatattgaagtgctggaaatcgatccggcactggaggcgtaacatgcagatcctgttggccaacccgcgtggtttttgtgccggggtagaccgcgctatcagcattgttgaaaacgcgctggccatttacggcgcaccgatatatgtccgtcacgaagtggtacataaccgctatgtggtcgatagcttgcgtgagcgtggggctatctttattgagcagattagcgaagtaccggacggcgcgatcctgattttctccgcacacggtgtttctcaggcggtacgtaacgaagcaaaaagtcgcgatttgacggtatttgacgcgacctgtccgctggtgaccaaagtgcatatggaagtcgcccgcgccagtcgccgtggcgaagaatctattctcatcggtcacgccgggcacccggaagtggaagggacaatgggccagtacagtaacccggaagggggaatgtatctggtcgaatcgccggacgatgtgtggaaactgacggtcaaaaacgaagagaagctctcctttatgacccagaccacgctgtcggtggatgacacgtctgatgtgatcgacgcgctgcgtaaacgcttcccgaaaattgtcggtccgcgcaaagatgacatctgctacgccacgactaaccgtcaggaagcggtacgcgccctggcagaacaggcggaagttgtgttggtggtcggttcgaaaaactcctccaactccaaccgtctggcggagctggcccagcgtatgggcaaacgcgcgtttttgattgacgatgcgaaagacatccaggaagagtgggtgaaagaggttaaatgcgtcggcgtgactgcgggcgcatcggctccggatattctggtgcagaatgtggtggcacgtttgcagcagctgggcggtggtgaagccattccgctggaaggccgtgaagaaaacattgttttcgaagtgccgaaagagctgcgtgtcgatattcgtgaagtcgattaagtcattagcagcctaagttatgcgaaaatgccggtcttgttaccggcattttttatggagaaaacatgcgtttacctatcttcctcgatactgaccccggcattgacgatgccgtcgccattgccgccgcgatttttgcccccgaactcgacctgcaactgatgaccaccgtcgcgggtaatgtctcggttgagaaaactacccgtaatgccttgcaactgctgcatttctggaatgcggagattccgctcgcccaaggggccgctgtgccgctggtacgcgcaccgcgtgatgcggcatctgtgcacggcgaatcgggaatggctggctacgactttgttgagcacaaccgaaagccgctcgggataccggcgtttctggcgattcgggatgccctgatgcgtgcaccagagcctgttaccctggtggccatcggcccgttaaccaatattgcgctgttactttcacaatgcccggaatgcaagccgtatattcgccgtctggtgatcatgggtggttctgccggacgcggcaactgtacgccaaacgccgagtttaatattgctgccgatccagaagctgctgcctgtgtcttccgcagtggtattgaaatcgtcatgtgcggtctggatgtcaccaatcaggcaatattaactcctgactatctctctacactgccgcagttaaaccgtaccgggaaaatgcttcacgccctgtttagccactaccgtagcggcagtatgcaaagcggcttgcgaatgcacgatctctgcgccatcgcctggctggtgcgcccggacctgttcactctcaaaccctgttttgtggcagtggaaactcagggcgaatttacctcaggcacgacggtggttgatatcgacggttgcctgggcaagccagccaatgtacaggtggcattggatctggatgtgaaaggcttccagcagtgggtggctgaggtgctggctctggcgtcgtaacctgtcacatgttattggcatgcagtcattcatcgactcatgcctttcactgatatccctccctgtttatcattaatttctaattatcagcgtttttggctggcggcgtagcgatgcgctggttactctgaaaacggtctatgcaaattaacaaaagagaatagctatgcatgatgcaaacatccgcgttgccatcgcgggagccggggggcgtatgggccgccagttgattcaggcggcgctggcattagaaggcgtgcagctgggcgcggcgctggagcgcgaaggatcttctttactgggcagcgacgccggtgagctggctggtgcagggaaaacaggcgttaccgtgcaaagcagcctcgatgcggtaaaagatgattttgatgtgtttatcgattttacccgtccggaaggtacgctgaaccatctcgctttttgtcgccagcatggcaaagggatggtgatcggcactacggggtttgacgaagccggtaaacaggcgattcgtgacgccgccgccgatattgcgattgtctttgccgccaattttagcgttggcgttaacgtcatgcttaagctgctggagaaagcagccaaagtgatgggtgactacaccgatatcgaaattattgaagcacatcatagacataaagttgatgcgccgtcaggcaccgcactggcaatgggagaggcgatcgcccacgcccttgataaagatctgaaagattgcgcggtctacagtcgtgaaggccacaccggtgaacgtgtgcctggcaccattggttttgccaccgtgcgtgcaggtgacatcgttggcgaacataccgcgatgtttgccgatattggcgagcgtctggagatcacccataaggcgtccagccgcatgacatttgctaacggcgcggtaagatcggctttgtggttgagtggtaaggaaagtggtctttttgatatgcgagatgtgcttgatctcaatagtttgtaaccacaaaatatttgttatggtgcaaaaataacacatttaatttattgattgtaaagggctttaatttttggcccttttatttttagttttatgtttttaaatattctataagtgccaaaaattacatgttttgtcttctgtttttgttgttttaatgtaaattttgaccatttggtccactttttcctgctcgtttttatttcatgcaatcttcttgctgcgcaagcgttttccagaacaggttatatgatctttttgtcgcttaatgcctgtaaaacatgcatgagccacaaaataatataaaaaataccgccattaagttgacttttagcgcccatatctccagaatgccgccgtttgccagaaattcgtcggtaagcagatttgcattgatttacgtcatcattgtgaattaatatgcaaataaagtgagtgaatattctctggagggtgttttgattaagtcagcgctattggttctggaagacggaacccagtttcacggtcgggccataggggcaacaggttcggcggttggggaagtcgttttcaatacttcaatgaccggttatcaagaaatcctcactgatccttcctattctcgtcaaatcgttactcttacttatccccatattggcaatgtcggcactaatgacgccgatgaagaatcttctcaggtacatgcacaaggtctggtgattcgcgacctgccgctgattgccagcaacttccgtaataccgaagacctctcttcttacctgaagcgccataacatcgtggcgattgccgatatcgatacccgtaagctgacgcgtttactgcgcgagaaaggcgcacagaatggctgcattatcgcaggcgataacccggatgcggcgttggcgttagaaaaagcccgcgcgttcccaggtctgaatggcatggatctggcaaaagaagtgaccaccgcagaagcctatagctggacacaagggagctggacgttgaccggcggcctgccagaagcgaaaaaagaagacgagctgccgttccacgtcgtggcttatgattttggtgccaagcgcaacatcctgcggatgctggtggatagaggctgtcgcctgaccatcgttccggcgcaaacttctgcggaagatgtgctgaaaatgaatccagacggcatcttcctctccaacggtcctggcgacccggccccgtgcgattacgccattaccgccatccagaaattcctcgaaaccgatattccggtattcggcatctgcctcggtcatcagctgctggcgctggcgagcggtgcgaagactgtcaaaatgaaatttggtcaccacggcggcaaccatccggttaaagatgtggagaaaaacgtggtgatgatcaccgcccagaaccacggttttgcggtggatgaagcaacattacctgcaaacctgcgtgtcacgcataaatccctgttcgacggtacgttacagggcattcatcgcactgataaaccggcgttcagcttccagggtcacccggaagccagccctgggccacacgacgcagcgccgttgttcgaccactttatcgagttaattgagcagtaccgtaaaaccgctaagtaatcaggagtaaaagagccatgccaaaacgtacagatataaaaagtatcctgattctgggtgcgggcccgattgttatcggtcaggcgtgtgagtttgactactctggcgcgcaagcatgtaaagccctgcgcgaagagggttaccgcgtcattctggtgaactccaacccggcgaccatcatgaccgacccggaaatggccgatgcgacctacatcgagccgattcactgggaagtagtacgcaagattattgaaaaagagcgcccggacgcggtgctgccaacgatgggcggtcagacggcgctgaactgcgcgctggagctggagcgtcagggcgtgttggaagagttcggcgtgactatgattggtgcgaccgccgatgcgattgataaagcagaagaccgccgtcgtttcgacgtagcgatgaagaaaattggtctggaaaccgcgcgttccggtatcgcacacacgatggaagaagcgctggcggttgccgctgacgtgggcttcccgtgcattattcgcccatcctttaccatgggcggtagcggcggcggtatcgcttataaccgcgaagagtttgaagaaatttgcgcccgcggtctggatctctccccaaccaaagagctgctgattgatgagtcgctgatcggctggaaagagtacgagatggaagtggtgcgtgataaaaacgacaactgcatcatcgtctgctctatcgaaaactttgatgcgatgggcatccataccggtgactccatcactgtcgcgccagcccaaacgctgaccgacaaagaatatcaaatcatgcgtaacgcctcgatggcggtgctgcgtgaaatcggcgttgaaaccggtggttccaatgtccagtttgcggtgaacccgaaaaacggtcgcctgattgttatcgaaatgaacccgcgcgtgtcccgttcttcggcgctggcgtcgaaagcgaccggtttcccgattgctaaagtggcggcgaaactggcggtgggttacaccctcgacgaactgatgaacgacatcactggcggacgtactccggcctccttcgagccgtccatcgactatgtggttactaaaattcctcgcttcaacttcgaaaaattcgctggtgctaacgaccgtctgaccactcagatgaaatcggttggcgaagtgatggcgattggtcgcacgcagcaggaatccctgcaaaaagcgctgcgcggcctggaagtcggtgcgactggattcgacccgaaagtgagcctcgatgacccggaagcgttaaccaaaatccgtcgcgaactgaaagatgctggcgcagagcgtatctggtacatcgccgatgccttccgtgcgggcctgtctgtggacggcgtgttcaacctgaccaatattgaccgctggttcctggtacagattgaagaactggtgcgtctggaagagaaagtagcggaagtgggcatcactggcctgaacgctgaattcctgcgccagctgaaacgcaaaggctttgccgatgcgcgtctggcaaaactggcgggcgtgcgcgaagcggaaatccgcaagctgcgcgaccagtatgacctgcacccggtttataagcgcgtggatacctgtgcggcagagttcgccaccgacaccgcttacatgtactccacttatgaagaagagtgcgaagcgaatccgtctaccgaccgtgaaaaaatcatggttctcggcggcggcccgaaccgtatcggtcagggtatcgaattcgactactgctgtgtacacgcctcgctggcgctgcgcgaagacggttacgaaaccattatggttaactgtaacccggaaaccgtctccaccgactacgacacttccgatcgcctctacttcgagccggtaactctggaagatgtgctagaaatcgtgcgtattgagaagccgaaaggcgttatcgttcagtacggcggtcagaccccgctgaaactggcgcgcgcgctggaagctgctggcgtaccggttatcggcaccagcccggatgctatcgaccgtgcagaagaccgtgaacgcttccagcatgcggttgagcgtctgaaactgaaacaaccggcgaacgccaccgttaccgctattgaaatggcggtagagaaggcgaaagagattggctacccgctggtggtacgtccgtcttacgttctcggcggtcgggcgatggaaatcgtctatgacgaagctgacctgcgtcgctacttccagacggcggtcagcgtgtctaacgatgcgccagtgttgctggatcacttccttgatgacgcggtagaagttgacgtggatgccatctgcgacggcgaaatggtgctgattggcggcatcatggagcacatcgagcaggcgggcgtgcactccggtgactccgcatgttctctgccagcctacaccttaagtcaggaaattcaggatgtgatgcgccagcaggtgcagaaactggccttcgaattgcaggtgcgcggtctgatgaacgtgcagtttgcggtgaaaaacaacgaagtctacctgattgaagttaacccgcgtgcggcgcgtaccgttccgttcgtctccaaagccaccggcgttccgctggcaaaagtggcggcgcgtgtgatggctggcaaatcgctggctgagcagggcgtaaccaaagaagttatcccgccgtactactcggtgaaagaagtggtgctgccgttcaataaattcccgggtgttgacccgctgttagggccagaaatgcgctctaccggggaagtcatgggcgtgggccgcaccttcgctgaagcgtttgccaaagcgcagctgggcagcaactccaccatgaagaaacacggtcgtgcgttgctttccgtgcgcgaaggcgataaagaacgcgtggtggacctggcggcaaaactgctgaaacagggcttcgagctggatgcgacccacggcacggcgattgtgctgggcgaagcgggcattaatccgcgtctggtgaacaaggtgcatgaaggccgtccgcacattcaggaccgcatcaagaatggcgaatatacctacatcatcaacaccacttcaggccgtcgcgcgattgaagactcccgcgtgatccgtcgcagtgcgctgcaatataaagtgcattatgacaccaccctgaacggtggtttcgctaccgcgatggcgctgaatgccgacgcgaccgaaaaagtaatttcggtgcaggaaatgcacgcgcagatcaaataatagcgtgtcatggcggatatttttcatccgctaatttgatcgaataagtaatacggttctctgatgaggaccgtttttttgcccattaagtaaatcttttggggaatcgatatttttgatgacataagcaggatttagctcacacttatcgacggtgaagttgcatactatcgatatatccacaattttaatatggccttgtttaattgcttcaaaacgagtcatagccagacttttaatttgtgaaactggagttcgtatgtgtgaaggatatgttgaaaaaccactctacttgttaatcgccgaatggatgatggctgaaaatcggtgggtgatagcaagagagatctctattcatttcgatattgaacacagcaaggcggttaataccctgacttatattctgtcggaagtcgcagaaataagctgcgaagttaagatgatccctaataagctggaaggacggggatgccagtgccagcgactggtaaaagtggtcgatatcgatgagcaaatttacgcgcgcctgcgcaataacagccgggataaattagtcggcgtaagaaagacgccgcgtattcctgccgttccgctcacggaacttaaccgcgagcagaagtggcagatgatgttgtcaaagagtatgcgtcgttaattttatctcgttgataccgggcgtcctgcttgccagatgcgatgttgtagcatcttatccagcaaccaggtcgcatccggcaagatcaccgtttaggcgtcacatccgtcgtcccctgcaaacgggggcgattttcctccatttgcctcagtggctgtgtttcatgtaacgatgcatgacagcgcccgacaagatcctgatactctttggtattcaaccgtttccagtgtaactcgtcgtcactaacactgcgtacagcgcgggctggcgtacccatcaacaactggcgtttctcgccgtgaaagcctgctttgacaaagctcatggcggcaacaatgctctcttcgccaatgaccgcgccatccataatcacgctgttcatcccgaccaatgcatcgcgaccaatcacacaaccatgcaggatcgctccgtgcccgatatggccgttttccccaacgatggtgtcagtgtcgcagtagccatgcataatgcagccatcctgaatattggctcccgcttgcacgatcaaccgcccgtagtcaccacgcagtgaggcgagtgggccgatgtagacaccggctcccacaatcacatcgccaatcaagacggcactgggatggacaaacgccgtcgggtgaaccaccggaattaacccctcaaaggcgtaatagctcacggttgttaacgtcctttccacaccggatcgcgcttctcggcaaacgccagcggcccttcaatggcatcctccgaatgcagaaccgacggatagtgtttcaacacgccgctgcgaatatagcgatacgcttcttctaccggcatttcgctggtggtgcggaagatctctttcagcgccgcaatcgccagcggggcgctgttaaccagctgctgcgccagttcgcgggcgttatccatcagttccgcctggctaaccacgcggttgactatcccccaacgcagcgcctcttctgcgcccattcgtctgccggtcatcaccatttcattgacgatggcaggcggcaggatcttcggtagacgcagcacgccgccgctgtcaggaacgatgcccagcttggcttccggcagggcgaagctggcgttatcggcacaaacaataaaatctgccgccagcgccagttcgaaaccgccgccaaaggcatagccgttcacagctgcgataaccggtttgtcgagattgaaaatttcggttaatcccgcaaatccacccgggccaaagtcagcatccggtgcttcgccttctgctgccgcttttaaatcccagcccgcggaaaagaacttctctccggcaccggtaataatggcgacacgtaattgcggatcgtcacggaaatttagaaatacttcgcccatttcaaagctggtttttgcatcaatagcattcgcttttggacgatcaagggtaatttccagaattgatccattgcgggtcagatgtaatgattcactcattccttttctccatttttgctttttcagggacgacaacatccctgcaaaaaatgcatattgttttatagcgtgattattagctggcagggtagttccctgctgtttcatttatttcagattctttctaattattttccccgagcaattacgtggcagatcttttctgatctccagataagagggcactttaaatttcgccatattttgttcgcagaagcggaaaaattcctcttcgctcaatgtttcaccttcattcagcaccacaaatgctttgatggcttcatcgcgaatcgaatctttaatacccacaaccacgatatcctgaatttttggatgggtggcgatgatattttccagctccacgcaggagacattctcgccaccgcgtttgatcatattgcagcggcgatcgacgaaataaaaaaagccctcttcgtcgcagtatccggtatcgccggtatgtagccagccgtcggcttccagcactttcgcagtggctttcgggttgagaaaatactctttgaagatggttttccctggtacgcctttaatacagatttcaccgatctcacctgccgggagcgggcgattgtgatcgtcgcggatctccgcttcgtagcaaaaccccgcccgaccaatcgacggccagcgtcgtttatcgctagggcgatcgccgataatgcccacaatggtttccgtcatcccataagacgtcagcaagcgaacgccgaagcgttcacaaaacgcatctttttcctgctccgacaagttgagataaaacatcacttcccgcaggcggtgttgccgatcgttcgctgaaggcggctgcaccatcaacgtacggatcatcatcggaatacattcggtaatggtggcgcggtacttctgcacctgtccccagaaggcgcgggcgctgtatttctcgaccagcacaaaggtggccccggcagaaaacgccgccatcgccgcagtacactggcaatcgatatgaaacgcaggcattaccgtcaggtagacgtcatcgtcacgcagtgcacactgccaggcggagtaatatccagcgaagcgcaggttgtaatgggtaatcaccacacctttcggtcgggaggtggtgccggaggtgaagagaatttccgccgtatcgtcagtcgatagcggcggtgcatagcacaaggtggcaggttgttgatttttcagttgagtaaacgaactcacgccatcatcagcgggaagtgccacatctgtcaggcaaatgtgccgcaattgagtggcatcttcctgctgaatctgttgatacataggatagaattgcgcactggtcaccagcaggcacgcctggctattttgcaggatccacgcgctttcctcgcgcaacaggcgggcgttaatcggcaccataatcgcgccaatttttgccagcccgaaccagcaaaagataaattccgggcagttgtcgagatgtagagcaaccttgtcgcctttgcgaatccctagcgtataaaacaggtttgccgtgcggttaatctcctgatttaactcaagataactataccggttaacgactccgccgctggattcacaaatcagcgccgttttatgaccgtaaacgtccgcaagatcgtcccacatttgacgtagatgttgtccgccaatgatatccattgcacctctatccatttttgttcgtttgttattgggcgggcgctagtcaggcaagccgactgacgccacgcgtttagtcctcaactttggccagacctttgctgaccaactcctgaatgtcgttttcgctgtagccgatatttttcaaaatggcagccgtgtccatgccatgtgagggcattccgcgccagatttgtccggggttatttttgaatttcggcatgatgttcggccctttgcaggtgcgaccatccatcgtttgccactgagtgattgattcacgggcaacatactgtggattgctttccagttccggtacggtcagtactttggcacaggcgatattcagttcggcaaagcgttctttaacttctgcgatggtatgtgccgccagccaggcatcgagtttttcttctaccagtgggccgtaagggcattcgatacggtggataagctgagtgccttccgggatttccggcgtaccgagtagatgtgcgaggccaatatctttaaagcactcttcaatttgggtaatgcccaccagttccatcacgatgtagccgtcggcgcatttatacagaccgcaaccggcgtagtagggatctttacctttgctcatgcgcgggcacatttcgccgccgttgaagtaatccatcatgaagtactggcccatacgcagcatcacttcatacatggcgatgtcgatactttcgcctttaccggtttcacgcactttatgcagtgctgccagcgccgccgtggtggcggtcaggccagaaaagtaatcggcggtatacgggaaggcaggcattggctggtcaacatcaccgttctgaatcaggtaaccactgaaggcctgggcgatggtgttataggccggaagattggtgtactcctcggtgccgtactgaccaaaaccggacaggtgagcgataaccagtttcgggttgtgctgccacagtacttcatcggtaatgccacgacgggcaaaggccggacctttactggcttcgatgaagatatcggtggtttccattaatttcagaaacgcttcgcggccttcatctttgaaaatatttaacgacagcgcgtgcaaattgcggcgggagagctgcgggtagttcggttgaacgcgaatggtgtcggcccaggcgacgttctcgatccagataacttccgcaccccattctgcgaacatttgcccggcgaacggcccggcgatttcgataccggagaagacaacgcgcaatccggccaacggcccgaatttcggcatgggtagatgatccattattagctcctgaaaaatttatgtagcgcatgactgccggatgcggcgtaaacgctttatccggcctacattcgtgctcccgtaggcctgataagacgcattagcgtcgcatcaggcagcgcacggacttagcggtattgcttcagcaccgcgcgacccagcgtcaggatctgcatttcgtcagatcccccggagacgcggtctacacgcaggtcacgccagaagcggctgatgcggtggttgcccgcaatcccgacaccgcccagcacctgcattgcgctatccacaacttcaaatgccgcattggcgcagaagtatttgcacatcgctgcatcgccagaggtgatggtgccgttgtctgctttccacgctgcttcatacagcatgtttttcatggagtttaatttgatcgccatgtgggcgaatttttcctgaatcaactggaaacgaccaatagcctcgccaaactgcacgcgctgattggcgtagcgcgccgcatcttcaaaggcgcacatcgccgtaccgtagttggtgagggctaccaggaaacgttcatggtcgaactcttctttgacgcggttaaagccgttaccttcccgaccgaacatgtctttctcgtccagttccacgtcgtcaaaggtgatttcacagcagctatccatacgcagaccgagcttttcaagtttggtcactttgatgcccggtttgctcatatcaacaaaccattcggtgtagacaggtttgtccggagaagccccgtcgcgcgccatcaccacgatgtacggggtgtaggcgctgctggtaataaaacacttactaccattaagataaatcttaccatttctacgggtataagtcgttttcaggctacccacgtcggagcccgcgcccggttcggtaatcgctgagttccacatctgcttaccggtgccgcggaaagccataatcttgtcgatctgctcttgtgtgccttcgcgcaggaaggtgttgaacccgcccggcaactggtacagtacataggttggtgcccccagacgtcccagctccatccacacggcggcgagagtaacaaaccccgcgtccagaccaccgtgctcttcagggatcagcagactgtcgatacccatatccgccagtgctttgacaaaacgttccgggtagacgctgtcacggtcgcactcggcaaaataggcctcccagttttcgctggccatcagttcgcggataccggcgacaaacagttcctgctcatcatttaaattaaaatccatctttcaacctcttgatattttgggggttaattaatctttccagttctgtttcgcgtctttaataaaggagagcgtcaccataatgttgacgaagaacagcgggcatcctccggcgataatggcagtttgaatcggtttcaggccgccgagcgccagcaaaacaataccgataatgccaaccagaattgaccaaccgatacgcaccagcagcggtggttcttcaccatcgcgtacttcgcggcaagtggacatcgccagggtataagagcaggcgttaaccagcgtaacggtggcaataaagcagaggatgaagaagccccacatggtggcggtgctgagtggcagagcggcccaggtttcaatgatggcgcgcgccacaccgtactgttcgatcagatttggaatgttgataatgtttttatctatcaacagcagagtgttactaccgagtacagtccacaggatccaggttgacgctgtcagccccagcaccatgccgaagcacagttcacgcacagtacgaccacgggagatgcgggcgaggaagatactcatctggatagcataaatcacccaccatgcccagtagaacacggtccagccctgcgggaagccgcctttagcgatgggatcggtatagaacaacatgcgcggcagatacatcagcaacatccccaccgaatcggtgaagtagttcatgatgaagctggcaccgctgacaatgaacacccaacccagcatcaggaagctcaggtaactacgcacgtcactggcgatacgtacccctttttgcagaccgcaagcgacgcaaatggcgttgaggataatccagcaggtaatgatgatagcgtccagttgcagggtatgcggaatgccaaacaaccattgcatacactcggtcaccagcggcgtggcaaggcccagactggtacccatcgcgaagatcaaggcgacgagatagaagttgtcgacgatagtgccgaacaaccctttggcgtgtttttcacctaccagcggcaccagtgtcgagctggggcgaatcacttccattttgcggacaaagaagaagtaagcgaaggcgactgaaaggaagctgtaagtggcccacggcagaggtccccagtggaacaagctgtaagccagccccaactctttcgcccctgtcgagttcggttctaagccaaacggcggggtggagatgtagtagtagatctcaatcgatccccagaacagtacggcagcagacgtacaggaggcgaacatcataaagatccaactggcggtactaaattcaggtggttcgttacctaaacgctttttggcatacgggccaaacaccagccagaaccaaccgaaaagcatcaccaccatataccattcaaatgcccatccccatacattggtgacgtaactgaatacagcattaataacgacattcgctgcatccagatctctgactgtaagccaacaaagtatgccgacgattattaacggcggaaagaaaaccttcggttctattcccgtttttctcttttcattcttcatgagttaattccactgtgaaaacgaatatttattttgcgttcccgtttgttttatttttgttaacatttgatataattattattaacctcgtggacgcgttaatggctaactcataatgggtattcaataagctgcattctgtgattgttatcacatttttgtttcgggtgaatagagggcgattttctcgttaattttgattattaatcagtttgttatgttgtgttgtgagtaaaaaaatagcatctgactttcaatattggtgatccataaagcaatattgaaaatttcttttttctacgccatgttttcaatattggtgaggaacttaacaatattgaaagttggatttatctgcgtgtgacattttcaatattggtgattaaagttttatttccaaattaaagggcgtgatatctgtaattaacaccaccgatatgaacgacgtttccttcatgatttctggagatgcaatgaagattattacttgctataagtgcgtgcctgatgaacaggatattgcggtcaataatgctgatggttcattagacttcagcaaagccgatgccaaaataagccaatacgatctgaacgctattgaagcggcttgccagctaaagcaacaggcagcagaggcgcaggtgacggccttaagtgtgggcggtaaagccctgaccaacgccaaagggcgtaaagatgtgctatcgcgcggcccggatgaactgattgtggtgattgatgaccagttcgagcaggcactgccgcaacaaacggcgagcgcactggctgcagccgcccagaaagcaggctttgatttgatcctctgtggcgatggttcttccgacctttatgcccagcaggttggtctgctggtgggcgaaatcctcaatattccggcagttaacggcgtcagcaaaattatctccctgacggcagataccctcaccgttgagcgcgaactggaagatgaaaccgaaaccttaagcattccgctgcctgcggttgttgctgtttccactgatatcaactccccacaaattccttcgatgaaagccattctcggcgcggcgaaaaagccagtccaggtatggtcggcggcggatatcggttttaacgccgtggacgcctggtctgaacaacaggttgctgcgccgaaacagcgcgaacgtcagcgcatcgtgattgaaggcgacggcgaagaacagatcgccgcatttgctgaaaatcttcgcaaagtcatttaattacaggggatgctatgaacacgttttctcaagtctgggtattcagcgataccccttctcgtctgccggaactgatgaacggtgcgcaggctttagctaatcaaatcaacacctttgtcctcaatgatgccgacggcgtacaggcaatccagctcggcgctaatcatgtctggaaattaaacggcaaaccggacgatcggatgatcgaagattacgccggtgtcatggctgacactattcgccagcacggcgcagacggcctggtgctgctgccaaacacccgtcgcggcaaattactggcggcaaaactgggttatcgccttaaagcggcggtgtctaacgatgccagcaccatcagcgtacaggacggtaaagcgacagtgaaacacatggtttacggtggtctggcgattggcgaagaacgcattgccacgccgtatgcggtactgaccatcagcagcggcacgttcgatgcggctcagccagacgcgtcacgcactggcgaaacgcacaccgtggagtggcaggctccggctgtggcgattacccgcacggcaacccaggcgcgccagagcaacagcgtcgatctcgacaaagcccgtctggtggtcagcgtcggtcgcggtattggcagcaaagagaacattgcgctggcagaacagctttgcaaggcgataggtgcggagttggcctgttctcgtccggtggcggaaaacgaaaaatggatggagcacgaacgctatgtcggtatctccaacctgatgctgaaacctgaactgtacctggcggtggggatctccgggcagatccagcacatggttggtgctaatgcatcgcaaaccattttcgccatcaacaaagataaaaatgcgccgatcttccagtacgcggattacggcattgttggcgacgccgtgaagatccttccggcgctgaccgcagctttagcgcgttgatccactctggcagggctgcattttggtcctgccgctgacagggagctcttatgtccgaagatatctttgacgccatcatcgtcggtgcagggcttgccggttcggttgccgcactggtgctcgcccgcgaaggggcgcaagtgttagttatcgagcgtggcaattccgcaggtgccaagaacgtcaccggcgggcgtctctatgcccacagcctggaacacattattcctggtttcgccgaatccgccccggtagaacgcctgatcacccatgaaaaactcgcgtttatgacggaaaagtcagcgatgactatggactactgcaacggtgacgaaacctcgctatcccagcgttcttactccgttttgcgcagtaaatttgatgcctggctgatggagcaggccgaagaagcgggcgcgcagttaattaccgggatccgcgtcgataacctcgtacagcgcgatggcaaagtcgtcggtgtagaagccgatggcgatgtgattgaagcgaaaacggtgatccttgctgatggagtgaactccatccttgccgaaaagctggggatggcaaaacgcgttaaaccgacggatgtggcggttggcgtgaaggaactgatcgagttaccgaagtcggtaatcgaagaccgttttcagttgcagggtaatcagggcgcggcttgtctgtttgcgggatcacccaccgatggcctgatgggcggcggcttcctttataccaatgaaaataccctgtcgctggggctggtttgtggtctgcatcatctgcatgacgcaaaaaaatcggtgccgcaaatgctggaagatttcaaacaacatccggccgttgcaccgctgatcgcgggtggcaagctggtggaatattccgctcacgtagtgccggaagcaggcatcaacatgctgccggagttggttggtgacggcgtattgattgccggtgatgccgccggaatgtgtatgaacctcggttttaccattcgcggtatggatctggcgattgccgccggggaagccgcagcaaaaaccgtgctttcagcgatgaaaagcgacgatttcagtaagcaaaaactggcggaatatcgtcagcatcttgagagtggcccgctgcgcgatatgcgtatgtaccagaaactaccggccttccttgataacccacgcatgtttagcggctacccggaactggcggtgggcgtggcgcgtgacctgttcaccattgacggcagtgcgccggaactgatgcgcaagaaaatcctccgccacggcaagaaagtgggcttcatcaatctgatcaaggatggcatgaaaggagtgaccgttttatgacttctcccgtcaatgtggacgtcaaactgggcgtcaataaattcaatgtcgatgaagagcatccgcacattgttgtgaaggccgatgccgataaacaggccctggagctgctggtgaaagcgtgccccgcaggtctgtacaagaagcaggatgacggcagtgtgcgcttcgattacgccggatgtctggagtgcggcacctgtcgcattctggggctggggtcggcgctggaacagtgggaatacccgcgcggcacctttggtgtggagttccgttacggctgatgttggtttgatacgtaacgccgtactgactctcattgcaaaaaaacaggaataacccatgcaaccgtccagaaactttgacgatctcaaattctcctcaattcaccgccgcattttgctgtggggaagcggtggtccgtttctggatggttatgtactggtaatgattggcgtggcgctggagcaactgaccccggcgctgaaactggacgctgactggattggcttgctgggcgcgggaacgctcgccgggctgttcgttggcacatcgctgtttggctatatctccgataaagtcggacggcgcaaaatgttcctcattgatatcatcgccatcggcgtgatatcggtggcgacgatgtttgtttcatcccccgtcgaactgttggtgatgcgggtacttatcggcattgtcatcggtgcagattatcccatcgccacctcaatgatcaccgagttctccagtacccgtcagcgggcattttccatcagctttatcgccgccatgtggtatgtcggcgcgacctgcgccgatctggtcggctactggctttatgatgtggaaggcggctggcgctggatgctgggtagcgcggcgatcccctgtttgttgattttgattggtcgattcgaactgcctgaatctccccgctggttattacgcaaagggcgagtaaaagagtgcgaagagatgatgatcaaactgtttggcgaaccggtggctttcgatgaagagcagccgcagcaaacccgttttcgcgatctgtttaatcgccgccattttccttttgttctgtttgttgccgccatctggacctgccaggtgatcccaatgttcgccatttacacctttggcccgcaaatcgttggtttgttgggattgggggttggcaaaaacgcggcactggggaacgtggtgattagcctgttctttatgctcggctgtattccgccgatgctgtggctaaacactgccggacggcgtccattgttgattggcagctttgccatgatgacgctggcgctggcggttttggggctgatcccggatatggggatctggctggtagtgatggcctttgcggtgtatgcctttttctctggcgggccgggtaatttgcagtggctctatcctaatgaactcttcccgacagatatccgcgcctctgccgtgggcgtgattatgtccttaagccgtattggcaccattgtttcgacctgggcactgccgatctttatcaataattacggtatcagtaacacgatgctaatgggggcgggtatctcgctgtttggcttgttgatttccgtagcgtttgccccggagactcgagggatgtcactggcgcaaaccagcaatatgacgatccgcgggcagagaatggggtaaattgttcagatttctctcttttctgaatcaatattattgactataagccgcgtgaatatatgactacactttgtgggaaaacaaaggcgtaatcacgcgggctacctatgattcttataatttatgcgcatccgtatccgcatcattcccatgcgaataaacggatgcttgaacaggcaaggacgctggaaggcgtcgaaattcgctctctttatcaactctatcctgacttcaatatcgatattgccgccgagcaggaggcgctgtctcgcgccgatctgatcgtctggcagcacccgatgcagtggtacagcattccaccgctcctcaaactttggatcgataaagttttctcgcacggctgggcttacggtcacggcggcacggcgctgcatggcaaacatttgctgtgggcggtgacgaccggcggcggggaaagccattttgaaattggtgcgcatccgggctttgatgtgctgtcgcagccgctacaggcgacggcaatctactgcgggctgaactggctgccaccgtttgccatgcactgcacctttatttgtgacgacgaaaccctcgaagggcaggcgcgtcactataagcaacgtctgctggaatggcaggaggcccatcatggatagccatacgctggttcaggcgctgatctacctcggatcggcggcgctgattgtacccattgcggtacgtcttggtctgggatcggtacttggctacctgattgccggctgcattattggcccgtgggggctgcgactggtgaccgatgccgaatctatcctgcactttgccgagattggcgtggtgctgatgctgtttattatcggcctcgaactcgatccacaaaggctatggaagctgcgtgcggcagtgttcggcggcggcgcattgcagatggtgatttgcggtggcctgctggggctgttctgcatgttacttgggctgcgctggcaggtcgcggaattgatcggcatgacgctggcgctctcctctacggcgattgccatgcaggcgatgaatgaacgcaatctgatggtgacgcaaatgggtcgcagtgcctttgcggtgctgctgttccaggatatcgcggcgatcccgctggtggcgatgattccgctactggcaacgagcagtgcctcgacgacgatgggcgcatttgctctctcggcgttaaaagtggcgggtgcgctggtgctggtggtattgctggggcgctatgtcacgcgtccggcgctgcgttttgtagcccgctctggcttgcgggaagtgtttagtgccgtggcgttattcctcgtgtttggctttggtttgctgctggaagaggtcggcttgtcgatggcgatgggcgcgtttctggcgggcgtactgctggcaagctcggaataccgtcatgcgctggagagcgatatcgaaccatttaaaggtttgctgttggggctgtttttcatcggtgttggcatgtcgatagactttggcacgctgcttgaaaacccattgcgcattgtcattttgctgctcggtttcctcatcatcaaaatcgccatgctgtggctgattgcccgaccgttgcaagtgccaaataaacagcgtcgttggtttgcggtgttgttagggcagggcagtgagtttgcctttgtggtatttggcgcggcgcagatggcgaatgtgctggagccggagtgggcgaaatcgctgaccctggcggtggcgctgtcgatggcagcaacgccgattctgctggtgatcctcaatcgccttgagcaatcttctactgaggaagcgcgtgaagccgatgagatcgacgaagaacagccgcgcgtgattatcgccggattcggtcgttttgggcagattaccggacgtttactgctctccagcggggtgaaaatggtggtactcgatcacgatccggaccatatcgaaaccttgcgtaaatttggtatgaaagtgttttatggcgatgccacgcggatggatttactggaatctgccggagcggcgaaagcggaagtgctgattaacgccatcgacgatccgcaaaccaacctgcaactgacagagatggtgaaagaacatttcccgcatttgcagattattgcccgcgcccgcgatgtcgaccactacattcgtttgcgtcaggcaggcgttgaaaagccggagcgtgaaaccttcgaaggtgcgctgaaaaccgggcgtctggcactggaaagtttaggtctggggccgtatgaagcgcgagaacgtgccgatgtgttccgccgctttaatattcagatggtggaagagatggcaatggttgagaacgacaccaaagcccgcgcggcggtctataaacgcaccagcgcgatgttaagtgagatcattaccgaggaccgcgaacatctgtcattaattcaacgacatggctggcagggaaccgaagaaggtaaacataccggcaacatggcggatgaaccggaaacgaaaccctcatcctaataaagagtgacgtaaatcacactttacagctaactgtttgtttttgtttcattgtaatgcggcgagtccagggagagagcgtggactcgccagcagaatataaaattttcctcaacatcatcctcgcaccagtcgacgacggtttacgctttacgtatagtggcgacaattttttttatcgggaaatctcaatgatcagtctgattgcggcgttagcggtagatcgcgttatcggcatggaaaacgccatgccgtggaacctgcctgccgatctcgcctggtttaaacgcaacaccttaaataaacccgtgattatgggccgccatacctgggaatcaatcggtcgtccgttgccaggacgcaaaaatattatcctcagcagtcaaccgggtacggacgatcgcgtaacgtgggtgaagtcggtggatgaagccatcgcggcgtgtggtgacgtaccagaaatcatggtgattggcggcggtcgcgtttatgaacagttcttgccaaaagcgcaaaaactgtatctgacgcatatcgacgcagaagtggaaggcgacacccatttcccggattacgagccggatgactgggaatcggtattcagcgaattccacgatgctgatgcgcagaactctcacagctattgctttgagattctggagcggcggtaattttgtatagaatttacggctagtgccggatgcgacgccggtcgcgtcttatccggccttcctatatcaggctgtgtttaagacgccgccgcttcgcccaaatccttatgccggttcgacggctggacaaaatactgtttatcttcccagcgcaggcaggttaatgtaccaccccagcagcagccggtatccagcgcgtatataccttccggcgtacctttgccctccagcgatgcccagtgaccaaaggcgatgctgtattcttcagcgacagggccaggaatcgcaaaccacggtttcagtggggcaggggcctcttccggcgattctttgctgtacatatccagttgaccgttcgggaagcaaaaacgcatacgggtaaaggcgttggtgataaaacgcagtcttcccagcccccgcaattccggtgaccagttatttggcatatcgccgtacatagcgtcgagaaagaagggataggagtcactcgatagcaccgcttctacatcgcgcgcgcactctttggcggtctgtagatcccactgcggcgtgatccctgcgtgggccatcaccaactttttctcttcgtcgatttgcagcaaaggctggcgacgcagccagttaagcagctcgtcggcatccggcgcttccagcagcggtgtcaggcgatctttcggtttattgcggctgatcccggcaaataccgccagcagatgcagatcgtgattgcccagcaccagacgtacgctgtcgcctaaggatttcacatagcgcagaacatccagcgaacccgggccgcgcgcgaccagatcgcccgtcagccagagggtatctttcccaggggtaaattctactttatgcagcaatgcgatcagttcatcgtaacaaccatgaacgtcgccaataaggtatgtcgccatattcttttaatgaatgagtgtgggaacggcgagtcggaatacgggaatgtcgatgctgaaagggacgccattttcatcgatcatttcgtagtgaccctgcatggtgcccagcggggtttcaatgattgcaccgctggtgtactggtactcttcgccaggcgcgataagtggctggacgccaaccactccttcgccctggacttcggtttcacggccattgccattggtgatcagccagtaacgccccaacaactgcactggcgctcgccccagattgcgtatggttacggtataagcaaaaacgtaacgttcattatcaggtgaagattgtgcctcaatgtagacgctttgaacctgaatacacactcggggcgaattgatcatcgttaactctcctgcaaaggcgcgttctccgccagatagttcgccatctggcaatattgcgcgacagagatattttccgctcgcatcgccgggtcgatccccattcccgttaacacctcggcgctaaacaggttgccgaggctgttacgaatggttttacgacgctggttaaaggcttcggtggtgatgcggctcaacacacgaacatctttaaccgggtgaggcatcgttgcatgaggaaccaggcgcacgacggcggaatccactttgggtggtggtgtaaaggctgacggcggaacttccagtaccgggatcacgttgcaatagtattgcgccatgacgcttaatcgaccatacgctttgctgttcggtcctgcaaccagacgattcaccacctctttttgcaacataaagtgcatgtcggcaatggcatcagtatagctaaacagatggaacatcaacggcgtggagatgttataaggcaggttgccgaaaacacgcagcggctgacccattttctcggccagttcgccaaagttaaaggtcatcgcatcctgctgataaatcgtcagtttcgggcctaagaatggatgcgtttgcagacgtgccgccagatcgcggtcaagttcgatgaccgtcagctggtccagacgttcgccgaccggttcggtcaatgccgccagaccggggccgatttcgaccatcgcctggcccttttgcgggttaatggcagaaacaatactgtcgatcacgaactgatcgttgagaaagttttgcccgaagcgtttacgggctaagtggccctggtggactcgattattcattgggtgttaacaatcattttgatggcgagattaagcgccgtaataaaactgccgacatcggctttaccacgtcccgccagttcaagcgcggtgccgtggtccactgatgtgcgaataaagggcaggcccagcgtaatgttcacaccgcgcccgaagccctggtattttagcacgggaagaccctgatcgtggtacatcgccagcacggcgtcggcgttatcgagatatttcggctgaaacagggtatcggcaggcagcggcccgttgagtttcatcccctgcgcccgcagctcgtcgagcaccggaataatggtgtctatctcttccgtacccatatgaccgccttcgcccgcgtgcggattcagcccgcagaccagaatgcgcggttcggcaataccaaattttgtacgcaaatcgtgatgcaaaatagcaatcacttcgtgcaaaagtgcaggggtgatagcatctgcgatatcgcgcagcggtaaatgcgtcgttgccagcgccacgcgaagttcttcggtcgccagcatcatcaccactttttcgcctgcgaacgctcttcgaaaaactcggtatgaccggtaaacggaatgcctgcgtcgttaatgacgcctttatgcacggggcctgtgatcagcgcagcaaattcaccgttcagacagccatcacacgctcgcgccagcgtctccaccacgtaatgtccattttcaatcgctaactgccccgcagtgacagattcacgtagcgcgacaggaagtagcgttaatgtgcccgtagtttgcggttgtgcaggggagttgggggaataagggcggagggtgagcggcaaaccgagcatcgctgcccggtcgataaggagagtggcatcggcacaaacaaccagttcgaccggccactcacgctgtgcaagctggacaactaagtccgggccaatcccggcgggctcgccgggagtgatcacaacacgttgggttttaaccattagttgctcaggattttaacgtaggcgctggcacgttgttcctgcatccagcttgctgcttcttccgagaacttacggttcatcagcatgcggtatgcacgatctttctgcgcagcgtcggttttatcgacattacgggtatccagcagttcgattaaatgccagccgaatgaagagtgaaccggtgcactcatttgacctttgttcaggcgagtcagggcgtcacggaaggccggatcgaaaatatctggtgtagcccagccgagatcaccgccctggttagcggagcctggatcctgagagaactctttcgctgcggcagcaaaagtcgttttaccactcttgatatcagcagcaatctgttccagtttcacgcgtgcctgttcgtcagtcatgatcggcgacggtttcagcagaatatggcgagcatgaacttcggtcaccgagatatttttgctttcgccgcgcaggtcgttaactttcagaatatggaagccaacgccggaacgaatcgggccaacaatgtcgcctttcttcgcggtgcttaatgcctgggcgaagatccccggcaactcctgaatacggccccagcccatctggccgccgttcagcgcctgctggtcggcagaatgagcaatcgccaacttaccgaaatcagcgccgttacgcgcctgatcgacaatggcacgcgcctggctttccgcttcgttcacctgatcagaggtcgggttttccggcagcgggatcaggatgtggctcaggttcagctcagtgctggcgtcgttttggttacccacctgctgcgccagggattcgacttcctgcggcaggatggtgatgcgacgacgcacctcgttgttacgcacttcagagataatcatctctttgcggatctggttacgataagtgttgtagttcagaccatcgtaagccagacggctgcgcatctgatccagcgtcatgttgttctgtttcgcgatgttagcaatcgcctgatccagctgctcatcggagattttcactcccattttctgccccatctgcaggatgatttgatccatgatcaaacgttccatgatttggtggcgcagcgtcgcgtcatcaggaagttgctgccttgcctgagcagcgttcagttttaccgactgcattaatccatcaacgtcgctttccagcacgacgccgttattgacgacggctgcgactttatcgactacctggggggcagcgaaactggtattcgcgatcatggcgataccgagaagcagcgttttccagttcttcatactttttccatttcaattaaccgcactgcggattacgtggtaaatcaacaaatcacaaagtgttttgatacggcagaatgttcgaacgcagcatctcttgcgtacccagaccgtagttggagctcaggccgcgaagttcgatgttaaagccgattgcgttgtcatataccgcatgttgtttatcgttatcccaaccgttcagcttccgctcgtaaccgacgcgaattgcatagcagcaggagctgtattgcacacctaacatagagtcggcttgcttgttcgcattggtgtcgtagtagtaggccccaacaatggaccaacgatcggcaattggccagctggcgacagcacctacctgcgaaataccattcttatattgctcagcagtggaatagtacttaggcagcgtagcctgaatatattccgggctggcgtaacggtaattcagctgtaccagacggtcttcatcccgacggtattcaatgctggagttactggtcgctacgttatccagacgtgtatcgtactgaatcccgccacgcaatccccaacgctcggagatacgccagtaagtatcgcctgcccacaccagtgaacccgttttgtcgtcattctcccatgttatgttgtcatcgccagtgcgagactccgtgaaatagtagatttgaccaacggaaatattaaaacgttcaacggcagcatcatcatatatgcgagatgtgacaccggtcgtcacctggttagcggaggcaatacggtcaagaccgccgtaagtccggtcccggaacaggccagagtagtcagattgcagcagagacgagtcgtagttatagatgtcgctctgatcgcgatacggcacgtacaaatactgcgcgcgcggttccagcgtttgggtataacccggagccagcatttccatatcgcgttcaaagaccattttgccgtcaactttgaattgcggcattacgcggttaacggattcgtccagcttggtcgtgtttctggagttataccagtcaagattggtttgctgataatgggttgccagcaacttcgcttcggtattgatgctgccccagttattagagagcggcaaattgatggtcggttccaggtgaacacgggttgcttcaggcatgtcgtctctggtgttaacaaagtgcactgcctggccgtaaatacgcgtatcaaacggaccaacatcattctggtagtaattaacgtctaactgcggctctgccgagtagctactggtgttctgttcgctgaaaacctggaactgcttggttgaaacggtggcattgaagttttgcaccgcatagccaacgctgaatttttgcgttgcgtagccgtcagtactggaaccgtacttgttatcgaaatcattgaagtagctaggatcgctgaccttggtgtagtcgacgttgaaacgccacacttgatccatgaccccggagtggttccagtagaataaccaacgacgtgaactgtcatcgttcgggtgttcatcttcatagactttatctgaaggcagatagtccagttccatcaagccagcgcccgcctgggagaggtagcggaattcgttctcccacatgatgttgccacgacgatgcatataatgcggcgtgatggtggcatccatatttggcgcgatgttccagtaatatggcaggtagaactcaaagtagttggtggtggtgtacttggcgttcgggatcaagaaaccagagcgacgtttgtcacccaccggcaactgcaaataggggctataaaagatcggtaccggacccaccttaaagcgggcgttccagatctccgcaacttgttcttcgcggtcatgaataatttcgctacctaccacgctccaggtgtcagaacccggcagacaggaggtaaagctaccgttatccagaatggtatagcggttttcgccacgttgtttcatcaggtccgctttaccgcgaccctggcgacccaccatctggtaatcaccttcccagacgttggtatctttggtgttcagattcgcccagcctttcggccctttgaggatcacctggttatcgtcgtaatggacattaccgagcgcatcaacggtacgtaccggctccggttgtcctggtgcctctttttgatggagctgcacttcgtcggcctgcagacggctgttaccctgcatgatatccacgctgccagtaaacacggcgtcatccgggtagtcccctttcgcgtggtcagcattgatagtcacgggtaagtcattggtatcgccctgtaccagaggacggtcatagcttggcacgcccaacatgcactgtgaggcgaggtcggctgccagtccctgttgactataaagggcggtggcaatcatggtggccaggagagtggggatacgttttttcatacgttgattttattgttccatcatcggtaacgttgcgcgtgacaaacggtcagagactaacgtactcgtcatctctacgctagtgttaatcctgtccgaatagcgtcagtggtgttaggcacggcattgaatgacaggtatgataatgcaaattataggcgatgtcccacaattgaccgcagccggaaaacggtaaaagcacctttatattgtgggagatagccctgatatccgtgtgtcgatttggggaatatatgcagtattggggaaaaatcattggcgtggccgtggccttactgatgggcggcggcttttggggcgtagtgttaggcctgttaattggccatatgtttgataaagcccgtagccgtaaaatggcgtggttcgccaaccagcgtgagcgtcaggcgctgttttttgccaccacttttgaagtgatggggcatttaaccaaatccaaaggtcgcgtcacggaggctgatattcatatcgccagccagttgatggaccgaatgaatcttcatggcgcttcccgtactgcggcgcaaaatgcgttccgggtgggaaaatcagacaattacccgctgcgcgaaaagatgcgccagtttcgcagtgtctgctttggtcgttttgacttaattcgtatgtttctggagatccagattcaggcggcgtttgctgatggttcactgcacccgaatgaacgggcggtgctgtatgtcattgctgaagaattagggatctcccgcgcccagtttgaccagtttttgcgcatgatgcagggcggtgcacagtttggcggcggttatcagcagcaatctggcggtggtaactggcagcaagcgcagcgtggcccgacgctggaagatgcctgtaatgtgctgggcgtgaagccgacggatgatgcgaccaccatcaaacgtgcctaccgtaagctgatgagtgaacaccatcccgataagctggtggcgaaaggtttgccgcctgagatgatggagatggcgaagcagaaagcgcaggaaattcagcaggcatatgagctgataaagcagcagaaagggtttaaataagttttaaactgtaggcctgataagacgcggcccgcgtcgcatcaggcaatcggcgcacaattgccggatgcggcgtgaacgccttatccgcctaccgaactgcgccagcgtgacgattaaaaatccgctggcgctttaaacgtcatactattgccatacgccggatgggtaatcgtcaacatctctgcatgtagcaacaaacgcggtgccatcgctctcgcttctggtgatgcataaaaacgatcgccgagaatcggatgccccagcgccagcatatgcacacgcaattgatgcgaacgcccggtaatcggttttaacaccactcttgccgtgttatccgccgcatactccaccacttcatattccgtctgcgcaggtttacccgtttcgtaacagactttctgtttcgggcggtttggccagtcgcaaatcagcggcagatccaccagaccttctgcgggggatggatgcccccagacgcgggccacatactgctttttcggctcgcgctcgcggaactggcgttttaactcccgctccgcggctttggtcagcgccactacaatcacgccgctggtagccatatccagacgatgcaccgattctgcctgcggataatcacgctgaatgcgcgtcatcacgctatctttgtgctcttccagacgacccggcacagacaacaaaccgctcggcttgttaaccaccataatgtggtcatcctgatacaggataaccaaccagggttcctgcggtggattgtagttttccatccccattttcggctccgttactgatgcgttacaacgatcaaacgcagggcatccagacgccagcctgcctgatccaggctttccattacctgctgacggttgctctcaatggcggtcagttcgtcgtcacgaatgttcgggttcactgcgcgcagcgcttccagacgagacagctcggcagacagtttttcgtcggcttcgttacgtgcggcatcaatcaatgcacgggcagatttctcgatctgcgcttcacccagctgaaggatagcgtgaacatcctgctgcacggcgttaaccagtttgctgccggtgtgacggttaaccgcgttaagctggcggttaaaggtttcaaactccacctgggccgccaggttgttgccgtttttatccagcagcatacgtaccggcgtcggtggcaggaagcggttgagctgcaactgcttcggcgcctgggcttcgaccacgtaaatcagttccaccaacagcgtacctaccggcaacgctttgttttttaacagtgaaatcgtgctgctaccggtatcgccagaaagaatcagatccagaccgttgcggatcagcggatgttcccaggtaataaactgagcatcttcacgcgccagcgccacttcacgatcaaaggtgatggtgatgccatcttccgacaggccagggaagtccggcaccagcatatgatcggacggggtcagcacgatcatgttgtcgccgcgatcgtcctgattgataccgataatatcgaacaggttcatggcgaaggcgatcaggttggtatcgtcatcctgctcttcaatgctttctgccagtgcctgggctttttcgccaccgttggagtggatttccagcaggcgatcacgcccctgttccagttgtgctttcagcgcttcatgttgctcgcggcagtttttgatcagatcgtcaaagccttcggtttgatccggtgaagccagatagttaatcagatcgttgtagacgctatcgtaaatagtgcgtccggtcgggcaggtgtgctcgaatgcatccagaccttcgtgataccagcgcaccagcaccgactgagcagttttttccagataaggcacatggatctgaatatcgtgcgcctgaccgatacgatccagacgaccaatacgctgctccagcagatccgggttgaatggcaggtcaaacattaccatgtggctggcgaactggaagttacgtccttcagaaccgatttctgagcacagcagtacctgtgcgccggtgtcttcttcggcaaaccaggcggcagcgcggtcacgttcgataatcgacataccttcgtggaacaccgcagcgcgaataccttcacgttcgcgcagtacctgctccagttgcagcgcagtggcagctttggcgcagatcaccagcactttctgagagcgatggctggtcaggtagcccatcagccactcaacgcgcggatcgaagttccaccaggtggcgttatcaccttcaaattcctgataaatacgctccgggtagagcatatcgcgagcacgatcttccgcacttttacgtgcgcccataatgccggagactttaatagccgtctgatactgcgtcggtagcggcagtttaatggtgtgcagctcgcgtttcgggaatcctttcacaccgttacgcgtgttacggaacagcacgcggctggtgccgtggcgatccatcagcatcgaaaccagctcctgacgggcgctctgggcatcttcgctgtcgctgtttgctgcctgcaacagcggctcgatatcctgctcgccgatcatctcgccgagcatgttcagttcgtcattgctcagtttgttacctgccagcagcatggcaacggcgtccgcaaccggacgataatttttctgctcttcaacgaactgcgcaaaatcgtggaaacggttcgggtccagcagacgcagacgggcgaagtggctttccatccccagctgttccggggtcgcggtcagcagcagaacgcccggcacgtgctctgccagttgttcaatggcctgatattcacggcttggcgcatcttcgctccacaccaggtgatgcgcttcatcgaccaccagcaggtcccattcggcttcacagagatgttccaggcgctgtttgctacgacgggcaaaatccagcgagcaaatcaccagctgttcggtgtcaaacgggttgtaagcatcgtgctgagcttcggcataacgctcatcatcaaatagcgcaaagcgcaggttgaaacggcgcagcatttctaccagccactgatgctgtaaggtttccgggacgataattagcacacgttcagcagcgccagagagcagttgctgatgcaggatcatcccggcttcaatggttttccctaaacccacttcgtcagccagcaggacgcgcggcgcgtggcggcgaccaacatcatgagcgatgttgagctgatgcggaatcaggctggtacgctgaccgcgcaggccgctgtacggcatacggaactgttcgctggaatacttacgcgcgcgataacgcagcgcaaagcggtccatacggtcaatctgcccggcaaacagacggtcctgcggtttgctgaacaccagtttgctatcaaggaaaacttcacgcagggctacgccggactcttcagtatccaggcgagtaccgatataggtcagcaagccattttcttcttttacttcttcgacttgcatctgccagccgtcatggctggtaatagtatcaccagggttgaacatcacgcgggtcacgggggaatcactgcgtgcgtacagacggttttcaccagtagatgggaaaagtaaagtgacagttcgcgcatccaccgcgacaacggttccaagtcccaattcgctttctgtatcgctgatccagcgttgaccaagtgtaaaaggcatatgtgttcggctctatatctttaattgcaggcaataaccacccgctaccgtgcttatgaggtagtggtgttattcaggtccaggaatggaaagggcgctatggtactggatggcaaagcattcgtcacgcatcaaaatggtatctggcgaactctttttttgctcaaaatagcccaagttgcccggtcataagtgtagcaaaattatcctcaataaaagggagtattccctccgccacgggttgtagctggcgggtcagatagtgttcgtaatccagtggtgaacgttggtagtccagcggctccgggccgttggtggtccatacgtacttaatggtgccgcgattctgatattgcaaggggcgaccgcgcttttggttttcttcatcggcaaggcgagcggcgcgtacatgaggcggcacattacgctgatactcgctcagcggacggcgaaggcgtttacggtaaaccagtcgcgcatccagttcacccgccatcagtttgtcgatggtttcgcgtacatattcctgatatggctcgttgcggaagatgcgcaggtatagctcctgctgaaactgctgggccagcggcgtccagtcggtgcgcacggtttccagccctttaaacaccatccgctgtttatcgccctcctgaatcagcccggcgtagcgctttttactgccggtatcggctccgcgaatggttggcatcagaaaacggcagaaatgagtttcatactccagttctaatgcgctggtcagccgttgtttttgcagcgtttccgcccaccaggcgttaacgtgctgcaccagtacacgaccgattttcgccgcctcttcttccgaatgtgcaccttttagccagacaaaagtcgagtcggtatctccgtagataacgtcgtagccctgcgcttcaatcaatgctttggtctgccgcatgatctgatgaccacgcatggtgatcgacgatgccaggcgcggatcgaagaagcggcaggcggtggtgccgagcacgccataaaaggcattcataatgatcttcagcgcctgcgaaagcggcttattaccctgacgtttggcttcatcgcgcccgtgccagatgttagtcacaatctccggcaggcaatgtttctcccgtgagaaccaggcatcgagaaaaccttcggtactgtgctctggatcaggttgcgccatgccttcaaccagcccgacgggatcaatcagaaaggtgcggatgatcgacgggtacaggcttttatagtccagcaccagcactgaatcataaagccctggccgtgaatccatcacgtagccgccagggctggcgtgcggtggcacttcgccgagattaggcgcgacataaccagcgcgatgcattcgcggaaaatagagatgaccaaacgctgccaccgaaccgccgtgccgatccaccggcaggccgttcaccgttgctcgttcgagtaaaaatggcatgatttcagttttgtggaagatctgcgtcaccagctcgcaatctttcaggttataagttgccagcgcaggtttatcttcggcgaaacggcggtcaatttcgtccattcgatcccacgggttatcgatagattttccttcgcctaatagctcctgagcgacagtttccagcgagaatgaagagaaattccagaacgcggatttcagcgcctcgataccgtcgataattagccgacctttagcctgggcaaaaaagacgccgtttttaaagccgtgctcgcgccactccagctcgctattatcgcgcccaagacgcagcggaagacggtaacgctcggcatgtttttgcagcattcgcagatcgaactgcaccacgttccagccgatgatcacatcgggatcgtggtttgcaaaccaggcgttgagtttttccagcagcagcgggcggctggcgacgtattccagttcgaaatcaagcgaggaggcgtcgccattctccggccccagcatataaacgatgcgctgcccgcagccttccaggccgatgcagtacagctcaccgtggcgggtggtttcaatatctatagaaacccacttgagcggcggacgatagtcgggatgcggtttcagacgggcattaacgatagtgccattgtgcatatcaccctcgacccacaccggtgaggtgataaaccgctccatcagatagcgttctggcgggcgcacatcggcctcgtagacggtaacgccaccttcacgcaggcgcttttcgtaattcatcaattggcgatgggcgcgacagtaaaggccatacaccggctggcggtgaaaatcctttaacgccagcggtgtcaggcgaaagccttgttcaccctgcaaaatatgctgagcgcggggaacctgatcggcgggaataaacgccacggactcttgcggtgcaagcgtaacctgcaacggcccgttgtccgtcgccagccagaaggagacttctgtcccttgcggggtgtcccgccagtgtcgggttaagataaaacctgcctgcgccacgctgaaaatccatcaaaaaaccaggcttgagtatagcctggtttcgtttgattggctgtggttttatacagtcattactgcccgtaatatgccttcgcgccatgcttacgcagatagtgtttatccagcagcgtttgctgcatatccggtaactgcggcgctaactgacggcagaatatccccatataagcgacctcttccagcacgatggcgttatgcaccgcatcttcggcatttttgccccatgcaaacgggccgtgggaatggaccagaacgccgggcatttgcgctgcatcgataccctgtttttcaaaggtttctacgatgacgttaccggtttcccactcatattcgccgttgatttctgcgtcggtcattttgcgggtgcagggaatggtgccgtagaaatagtcggcgtgggtggtgccggttgctggaatcgactgacccgcctgcgcccagatggtggcgtggcgcgagtgcgtatgcacaatgccgccaatggaggggaatgcctgatagagcagccggtgagttggcgtgtcggaggagggctttttcgtaccttcaaccacttcaccggtttcgatgctaaccacgaccatatcgtcagcggtcatgacgctgtaatcgacgccggaaggtttgatcacaaagacgccgcgctcgcgatcaacggcgctgacgttgccccatgtgagcgtgaccaggttgtgttttggcagcgccaggttggcttctaatacctggcgtttgagatcttctaacatgttgactcctgagaggtcgtttcccctcaccccggccctctccccaaaggggcgagggggaaaacaatgccggatgcgctttgcttatccggcctacaaaatcgcagcgtgtaggccagataagacgcgtcagcgtcgcatcaggcgttacatacctgatgtggctacttagcgacgaaatccgtaatacacttcgttccagcgcagtgcgtctttaaacgctggcaggcgggtgtcgttatcaatcaccgtgatttcaatgtcgtgcatctcggcgaactggcacatatcgttgaggttcagcgcatggctgaagacggtatggtgcgcgccaccagcaaggatccacgcttcggaagcagttggcagatccggttgcgctttccacagcgcattcgccaccggcagtttcggcagggagtgcggtgttttcaccgtgtcgatacagttaaccagcagacggtaacgatcgccgagatcaatcaggctggcgacaatcgctggaccggtttgggtattgaagatcagtcgggcaggatcgtccttaccaccaataccgagatgctgaacgtcgaggatcggtttctcttctacggcaatcgacgggcagacttccagcatatgggagccgagcaccaggtcattacctttctcgaagtgataggtgtagtcctccataaaggaggtgccgccctgcagaccggttgacatcaccttcatgatgcgaagcagggcggcggttttccagtcgccttcgcccgcaaagccgtaaccctgctgcatcagacgctgtacggccagacctggaagctgtttcagaccgtgcaaatcttcaaaggtggtggtgaacgcgtggaagccaccttgttccaggaaacgcttcatccccagctcaatacgcgccgcttccagcacgttctgtcgtttttcgccgtggatttgtgtggcaggcgtcatggtgtagcagctttcgtactcatcgaccagcgcgttaacatcgccgtcgctgatggagttcaccacctgcaccagatcgccaaccgcccaggtattgacggagaaaccgaacttgatctgtgcggcaactttatcaccatcggtgaccgctacttcacgcatgttatcgccaaaacggcagactttcagatgacgggtatcctgtttagagaccgcctggcgcatccaggagccgatacgctcatgggcttgtttatcctgccagtgaccggtaaccacggcatgttgctgacgcatacgcgcgccaatgaagccgaactcgcgaccgccatgtgcagtctggttcaggttcataaagtccatatcgatactgtcccacggcagcgccgcgttaaactgggtgtggaattgcagcaacggtttgttgagcatggtcaggccgttgatccacattttggccggggagaaggtgtgcagccacaccaccagaccagcgcaacgatcgtcgtaattcgcgtcgcggcaaatagcggtgatttcatccggcgtggtgcccagcggtttcaacaccagtttgcagggcagtttcgcttccgtattcagcgcattaacaacgtgctcggcatgttgggtgacctgacgcagggtttccgggccatacagatgctggctgccaatgacaaaccacacttcataattatcaaaaatcgtcattatcgtgtccttatagagtcgcaacggcctgggcagcctgtgccggggcggaagttggaagatagtgttgttcggcgctcatcgcccattgctgatagcggcgataaagctgttcaaagcgttgtgcctgttcgctgcgcggttgcagggttttctctaccgcactggccatttttgctgggctgatgggatgtctgcgtgcactttcgcggcgacggcagcaaaaatcgccgcaccgagcgcacagcactggtcagaggcaacaatttgcagcgggcgattcagcacgtcgcagcaggcctgcataatgacctggtttttccgcgcgatgccgcccagcgccatcacgttattgacggcgatcccctgatcggtaaagcactccatgattgcgcgtgcgccaaaggcggtggcagcaatcaaaccgccgaacagcagcggagcgtcggtagcgaggttaagatcggtaatcacccctttcaggcgttggttagcgttcggtgtgcggcggccgttaaaccagtcgagcaccaccggcaggtgatccagagacggatttttggcccatgcttcggtcagcgccggaagcagttgtttctggctggcgttgatttgcgctttcagttccggatgctgggcggcaagctgttccagcggccagccgagtacgcgaccaaaccaggcgtagatatcaccaaacgccgattggcctgcttccagaccgataaatccaggtaccacgctgccatcaacctgaccgcaaatacctttcactgcccgctcgccaacgctctgtttgtcggcaatcagaatgtcgcaggtggaagtaccgataacttttaccagtgcgttaggctgtgcgcctgcgccaactgcgcccatatggcagtcaaacgcgccgccggaaatcaccacgctttcaggcaggccgagacgctgcgcccattccgggcataaggtgcccaccggaatatcggcagtccaggtgtcagtgaacagcggggaaggcaaatggcgattgaggatcgggtccagctcatcaaagaaactggctggcggcaagccaccccagctttcgtgccatagcgacttatgcccggcgctgcaacgtccgcgacgaatatcctgcgggcgggtggtaccggaaagcagagctggcacccagtcgcacagctcaatccacgatgcggcagattgcgccacggcggtgtcctggcgagtcacatgcaggatttttgcccagaaccattcgctggaataaataccgccaatgtagcgggagtagtcaacgttgcccggcgcgtggcacaaacgggtaatctcttccgcttcttcaaccgcagtgtggtctttccacaatacgaacatcgcgttcgggttttcggcaaactccgggcgcagcgccagcacgttaccgtcggcatcaatcggtgcgggcgtcgagccggttgtgtcaacgccaatcccgaccacagctgcgcgctgttcgacgctaagctctgcaagcacggttttcagtgccgcttccattgactcaatgtagtcacgcggatgatgacggaactggttattcggggcatcacaaaattgccctttttgccaacggggataccactctacgctggtggcgatctcttcaccgctggcgcagtccaccgccaaagctcgcacagaatcactgccaaaatcgaggccaattgcaatcgccatcgtttcactccatccaaaaaaacgggtatggagaaacagtagagagttgcgataaaaagcgtcaggtaggatccgctaatcttatggataaaaatgctatggcatagcaaagtgtgacgccgtgcaaataatcaatgtggacttttctgccgtgattatagacacttttgttacgcgtttttgtcatggctttggtcccgctttgttacagaatgcttttaataagcggggttaccggttgggttagcgagaagagccagtaaaagacgcagtgacggcaatgtctgatgcaatatggacaattggtttcttctctgaatggcgggagtatgaaaagtatggctgaagcgcaaaatgatcccctgctgccgggatactcgtttaatgcccatctggtggcgggtttaacgccgattgaggccaacggttatctcgatttttttatcgaccgaccgctgggaatgaaaggttatattctcaatctcaccattcgcggtcagggggtggtgaaaaatcagggacgagaatttgtttgccgaccgggtgatattttgctgttcccgccaggagagattcatcactacggtcgtcatccggaggctcgcgaatggtatcaccagtgggtttactttcgtccgcgcgcctactggcatgaatggcttaactggccgtcaatatttgccaatacgggtttctttcgcccggatgaagcgcaccagccgcatttcagcgacctgtttgggcaaatcattaacgccgggcaaggggaagggcgctattcggagctgctggcgataaatctgcttgagcaattgttactgcggcgcatggaagcgattaacgagtcgctccatccaccgatggataatcgggtacgcgaggcttgtcagtacatcagcgatcacctggcagacagcaattttgatatcgccagcgtcgcacagcatgtttgcttgtcgccgtcgcgtctgtcacatcttttccgccagcagttagggattagcgtcttaagctggcgcgaggaccaacgtatcagccaggcgaagctgcttttgagcaccacccggatgcctatcgccaccgtcggtcgcaatgttggttttgacgatcaactctatttctcgcgggtatttaaaaaatgcaccggggccagcccgagcgagttccgtgccggttgtgaagaaaaagtgaatgatgtagccgtcaagttgtcataattggtaacgaatcagacaattgacggcttgacggagtagcatagggtttgcagaatccctgcttcgtccatttgacaggcacattatgcaagcattgctggaacactttattacccaatctaccgtgtattcattgatggcggtggtgttggtggcctttctggagtcgctggcgctggtcggtttgattctacccggtacggtgctgatggcggggctgggagcgctgattggcagcggcgagttaagtttctggcacgcctggctggcagggatcgtcggttgcctgctgggcgactggatctccttctggctgggctggcgttttaaaaagccgttgcatcgctggtcatttctgaagaaaaacaaagcattactcgataaaactgaacatgcgttgcatcaacacagcatgttcaccattctggtcggtcgttttgttggcccgacgcgtccgctggtgccaatggtggcgggaatgctggatctgccggtggcaaaattcattacgccgaatattatcggctgcctgctgtggccgccgttttacttcctgcctgggattctggcgggcgcggcgatcgatattccagccggaatgcagagcggcgagtttaaatggttgctgctggcgacggcggtatttttgtgggttggtggctggctgtgctggcggttatggcgcagcggtaaagcaaccgatcgtttaagtcattatttgtcgcgcggccgtttgttgtggctgacgccgttaatttctgccatcggcgtggtggcgctggtggtgttaattcgccacccgttgatgccggtgtatatcgatattttgcgtaaagtggttgggggttaggagatagtcttgtgcgggttgcctgatgcgacgctgaccgcgtcttatcaggcctacaaaacgcactacccgtaggtcggataaggcgttcacgccgcatccgacagtgcatactaacccgtaatccccaatagtgccgaagcactcgccttaccgctcaacaactcattggtcttaccctgccaggcgatgcgcccgtcggcgaccaccaccgagcgtgtggcgatccgcgccgcatcttccacactgtgcgacaccatcaatagcgtcattttttgctgctggcagctcgtgctcaccagcgtcagcatctcctgacgtaacgccggatcgagcgcagagaacggttcatcgagcaataaaatcggctgttcgcgcaccagacaacgcgctaacgccacgcgctgtcgctgaccgccggaaagctcgcccggtaaccgcgccattaaattatcaatccccatctggcgggcgatagcgtgcattttctcctgctgcgccgcgttcagcttcaatcccggattaagccccagcccgatgttctgcgcgaccgtcaggtggctgaacaggttgttctcctgaaacagcatcgataccgggcggcgtgacggcggcgtcgtggtgtgatcaacgctgtcgatagtcagcgaaccgctggctggcgtcagaaaaccggcaatcaaattcagcagggtacttttacccgcgccgcttggcccgaggattgccacctgctcgccgcgttctaccgttaagctaaaacgcatcggcaaatggtgataaagccaggtgatatcagtcagttttaacatttcgccccggtagtttttcaatcacggtaaacagcagaaaacagagtagtagcagaattaacgcggtgaccgcgccgtcctggctgcgataggagccaatttgctggtagagataaaacggcagggtacggaaatcatcgttaccgaacaacgccactacgccaaaatcaccaatcgacagcacgcaggcaaaagccagcgcctgcgccagtggacgtttcagggcgcgcagctcgaccacttttaagcgcgaccagccttcaatgcccagcgactgacacaacatactgtagcgggcggtgatatcgcgcatcgggttttccagtactttcagcgcataagggatcgccattaacgcattggtgaaaatcacaatgccgtcagcagattgcggcaggccaatggtgttgttgagcagtaaaaagaagccggtagccagcacaatccccggcatggcgaggatcaacatgccgctcatctccagcgcctgacccgccagcattttctgccgcgcccgcagttcgcgactgctccatagcagcatcatggtcagcactacgcacaatacacctgccgccagcgcaatacgcaacgaggtccacagcgcctgccacagcaccggttgtgccagcacttccggcaactggcgatttaccccatcgacgatcaccgccagcaacggtggcagcaacagcagcagcgccagcactattaacaccgtgtcgcaaatgcggctatgcagacgatcgtccggatcgcgccagccttgcagcagcgtggtaccgggcgcaatggccttacttagtcgctgactcaacagcaccagcccaaggcaacacaccatctggagcagcgccagcatcgccgcgcgggcaggatcgtagtcgtaactcagcgcctgataaatagccagctcgatagtagttgcctgcggaccgccgcccagcgatagcacggtggcgaagctggcgaaacagagcataaagataagcgcggcaaccggcgggatttgtcgccgtagccacggccattcgacgaagcggaaaaaatgccagccgcgcatcccaagctgggcggcaagctgacgttgttcgccgggaatgttttccagtgcctggagtaataagcggctcgccatcggcagattaaaaaatacgtgcgccagcaaaatgccttgcaggccgtagggcgaaaaggtccactccagaccgagcgattggcagagcgatgccagccagccctgacgaccatagacgctaagaatgccgaaaacagcaactagcaccgggaggatcaaggtcattgcgcacagacgcaacagcgccagccgacccggaaagcgcctgcgatagagggcgcgggcgaggaatatcgcgggtacgacagagagtagcgccgagagaaacgcctgccagaaggagaagcgcaccacatgacacaggtagctgtcctgccagattgccacccagttaccctgcggcgcgttccaccacagggcgagaaacgccgccagcgcaaccgctaccaccagcgtggcggcgcttacacctggaattaaccagccgggaattaacggctgacggcgcgttgccattcgctaatccatgcctgacgttgtgccgccacttcggctggcgtgaactccagcgtggttgcgggtttggtcaattgttcaaaaccggcaggcagcgtgacgtttgccaccggatacatccagttgccggttgggatcgcattctgaaaagccggagaaaccataaactggaggaatttttgcgccagctccggctgcttgctggcagcggtgcgggcggcgacttccacctgcagatagtgaccttcgctaaagttcgcggcggcgtagttatcttttttctcttcgagaatgtgataagccggagaggtggtgtaactcagtaccagatcgctttcaccttttaaaaacaggccgtaggcttcgctccagcctttggtgaccgtgacggttttcttcgccagtttttgccaggcttgtggggcgtcatcgccatagactttttgcatccacaacagcaggcccagccccggcgtactggtgcgcggatcctgataaatcacccgccagttttgatcgctctcaacaagctctttcaggctttgcggcggatttttcagtttgttcttgtcatagacgaaggcgaaatagccgtaatcaaacggtacgaaagtgtcattattccagccgccgggaacgttaacggcatccgctgccacgccgcttttggcaaatagtccggttttactggcggcgtctaacaggttgttatccagccccagcaccacatcggctttactgtttttgccttccatgcgcagacggttgagaagcgaaacgccatcttccagcgccaccagtttcagttcgcaattacagtcggcttcaaaggctttttttaccaccgggcctggcccccagttggcggcgaaggaatcgtaggtataaacagtcagaacgggtttagcgaaaacgggcgctgtgcacagcaacagcaggggcagacatttttttaacactttgcacctcaaaaaagagtggcaaaggacttgagaaggagcctcaaatcccttcgccggcgttatccggatcaggttcgacgggtattttctcagcgcacgcgtctgcgtggcaccccgttgagaacggcgttagtgtagtgattttgttatcaaccagcaatcatggatccggtggcgcaaaccacgctgatttaaaatcgaaccagccgagggtattcatgcgcaggccgcgcatactgcgttgcccctgaatgatcagccagtggtggataagcggcaccattgctttactggcgaccagttgctggcaccagttcgccaggttcatttcgccattgcgccagcgggcggcgtcggcttgccagtcgatcggaatacagtgttggagcagcggcacctcgcacaagtgcgcgaacagcgaaaaatccagcggcagcgtaaagttggcgctattaagccagatatcgctctcgatctctccttcatgccactgatcgtagctgatctctttgatttccagcgtgacctggtgacttgccagaatctgctgcatgatcccggcaatcacccgatgctcactgtgatcctgataaaaggtcagggtgaggctttccaggccagccggtttttcgctctttatggtgcgggcatggtgccaacgggggagcagtccataagccgggaaccacagttgctggtactgttcctcagcgaaatagaccagattagttggagaaagcacatagcttacccagtccctgacttgctgattcgccccgcgatgggtgcggctgtcgaacagtaaatagtagcaaccttcctccaggcggctttcaatctctttttcctcgccctgtggaccttttagcatcagacctccagctggctcgtcggcaatttccggcagaacccagacgttaacttcatcgattaatgcccggtaaccgaagaagtcatcgaatgcctgaattttcagttgattggtggtgttgcggatcaccgcatacggaccggtgccgatgggatggctggcaaagttactgagggtttcccattcgcgcggcaggatcatcgccggaacttgtcccagcagtaacggtaaccagcggtccggttgcgtgagatggatatccagcgtccagggcgtcggcgacacaatgtccgcaatatgcgaatagagcggcagcgtattgattcgttttaaagaggcgatcacgtcgtccatttccagttcacgaccatgatgaaaatggactcctggacgcaaaaagaaacgccagtgaagcggtgatatttgctgccagtggtgggcgatgtctgcttccagttccccattttcctcatttatgcgcgttagcgaactgaagatttgccgggcaatatgggtttcggaacggcgcaatgcgctgccaggtagcagattacgcaacggacgatagtagagcacgcgcaggatgtgccgcccctggcggaagctgcggcccagatgagaaaccagcatttgccgcacagtcgctttgtcgccaaccaactgcactagttggtcgatacgatcctgctccagcaggtcttccgcccgctgttgctgaagcgccagcccggtatagaggaatgtcagacgcgagcgtttaccgcgcccgacttccgcttcccacgtcagccagccgcgatcctgcatggtgttgagcagggtacgcatatgacgacgcgagcagctcaataacgctgccagttcgttgagcgttgtgtcctgcgatttaccctcgcagcattgccacaggcggatgaactgttgttgcagacgagcagatggcataaaaggggaactcctgcgcaaaagacagcaattttattttccctatattaagtcaataattcctaacgatgaagcaaggaggtgccccatgcgtcagttttatcagcactattttaccgcgacagcgaagttgtgctggttgcgttggttaagcgtcccacaacgattaaccatgcttgaaggactgatgcagtgggatgaccgcaattctgaaagttgacttgcctgcatcatgtgtgactgagtattggtgtaaaatcacccgccagcagattatacctgctggttttttttattctcgccgcgctaaaaagggaacgtatgatctggataatgacgatggctcgccgtatgaacggtgtttacgcggcatttatgctggtcgcttttatgatgggggtggccggggcgctacaggctcctacattgagcttatttctgagtcgtgaggttggcgcgcaacctttctggatcggactcttttatacggtgaatgctattgctgggatcggcgtaagcctctggttggcaaaacgttctgacagtcagggcgatcggcgaaaactgattatattttgctgtttgatggctatcggcaatgcgctattgtttgcatttaatcgtcattatctgacgcttatcacctgtggtgtgcttctggcatctctggccaatacggcaatgccacagttatttgctctggcgcgggaatatgcggataactcggcgcgagaagtggtgatgtttagctcggtgatgcgtgcgcagctttctctggcatgggttatcggtccaccgttggcctttatgctggcgttgaattacggctttacggtgatgttttcgattgccgccgggatattcacactcagtctggtattgattgcatttatgcttccgtctgtggcgcgggtagaactgccgtcggaaaatgctttatcaatgcaaggtggctggcaggatagtaacgtacggatgttatttgtcgcctcgacgttaatgtggacctgcaacaccatgtacattattgatatgccgttgtggatcagtagcgagttaggattgccagacaaactggcgggtttcctgatggggacggcagctggactggaaataccagcaatgattctggctggctactatgtcaaacgttatggtaagcggcgaatgatggtcatagcagtggcggcaggagtactgttttacaccggattgattttctttcatagccgtatggcgttgatgacgctgcaactttttaacgctgtatttatcggcattgttgcgggtattgggatgctatggtttcaggatttaatgcctggaagagcgggggcagctaccaccttatttactaacagtatttctaccggggtaattctggctggcgttattcagggagcaattgcacaaagttgggggcactttgctgtctactgggtaattgcggttatttctgttgtcgcattatttttaaccgcaaaggttaaagacgtttgatgacgtggacgatagcggaaagcccggtcatttgaccgggcaaggggattaattcataaacgcaggttgttttgcttcataagcggcaatggcgtcgtcgtgctgcaaggtaagcccaatactgtccagaccgttcatcatgcagtggcggcggaaggcatcgatggtaaagcgataggttttctctcccgctttcacctcttgcgcttccagatccacgtcgaaatggatccccggattggctttcaccagcgcaaacagttcgtccacttctgcatcgcttaatttcaccggcagcagctggttgttaaagctattgccgtagaagatgtcagcaaaactcggcgcaatcaccactttaaaaccgtagtcggtcaatgcccagggcgcgtgctcacgcgaggagccacagccgaagttttctcgtgccagcaaaatggaagcgccctgatactgcgggaagttcagcacgaagtccgggtttggctgttggcctttttcatcgagaaaacgccagtcgttaaacagatgcgcgccaaaacccgtacgggtcactttctgcaaaaactgtttcgggatgattgcatcggtatcgacattggcggcatccagcggaaccaccaggcctgtgtgtttgataaatttctctgccatggtgtgctccttatttaatgttgcgaatgtcggcgaaatgtccggtcacagcagcagcggcagccattgccgggctgaccagatgcgtgcgcccgccgcgcccctggcggccttcaaagttacggttgctggtggatgcacaacgttcgcccggattcagacggtcgttgttcatcgccagacacattgagcagccaggcaagcgccattcaaaaccggcttcaataaagattttatccagaccttccgcttccgcctgggcttttaccgggccagagccgggaaccaccagtgcctgcacgcctggcgcgacttttcgccctttggcgatctccgctgccgcgcgtaaatcttcaatgcgcgagttggtacaggaaccgataaacactttgtcgatagccacttcggtcagcggaatgcccggtttcagccccatataggccagcgctttttctgccgacgcgcgttcaaccggatcggcaaacgaagccggatcgggaatattgtcgttcacggaaatcacctggccgggattggtgccccaggtgacctgcggtgaaatttcttctgcttgcagagtgacaacggtatcgaaagttgcgccttcgtcggtttgcagggttttccagtaggcaacggcgtcgtcgaaatctttgcctttcggcgcatgcagacggcctttgacatagttaaaggtggtttcgtccggtgcaaccagaccggcttttgcgcccatttcgattgccatattgcacagggtcatacgaccttccatgcttaaatcacggattgcttcgccgcaaaactccaccacatgcccggtgccgcctgcgctaccggttttaccgataattgccagcacgatatcttttgcggtaatgcccggcgcggctttgccctggacttcaattttcatggtttttgcgcggccctgtttcagggtttgcgttgccagtacgtgttcaacttcggaagtgccgataccaaaggccagtgcgccaaacgcgccgtgggtggcggtatgcgagtcgccgcagacaatggtcatccccggcaaggtgacgccctgttccggccccattacgtggacgatcccctgatacgggtgattcaggtcatacagttcgacgccaaattctttgcagtttttgatcagttcctgcatctggatacgcgccatttcaccgcaggcattaatgtctttggtctgggtagagacgttgtgatccatggtagcgaaggttttgcccggctgacgtaccgggcgaccgtgggtgcgcagaccatcgaacgcctgcggtgaggtcacttcatgcaccaggtggcggtcgatatataacagtggggtttcgttttcggcttcgtacacaacgtgagcgtcgaacaatttttcgtataacgtcttagccatgattacaccccttctgctacatagcgggcaatgatatcgcccatttcatcggtactaacggcggcagcgccacgggctaaatccccggtgcgaatgccttcttctaatgcgcggttaatggcgcgttcaatggcgcaagccgcatcatcggcatccaggctgtaacgcagcagcagtgccagcgaaaggatttgtgcaatcgggttggcgatgtttttgcctgcgatatctggtgccgagccgcccgccggttcatacagtccaaaaccttgctcgttcaggctggcggaaggcaacatccccatcgagccagtgatcattgcgcactcgtcagacagaatgtcgccaaacaggttggagcacagcagaacgtcaaactgtgatggatctttaatcagctgcatggtggcgttgtcgatgtacatatgcgccagttcgacatccgggtattccgtggcgatctcgttaacgatctcccgccataaaatagaggattgcagcacgttggctttatcgatcgacgtcactttgtggcgacgcttgcgagcagattcaaacgcgatgcgggcgatacgttcgatctcaaaacggtgatacacctcggtatcaaaggctttttcatattgtccgctaccttcgcggccttttggctgaccgaaatagatgccgccggtcagttcgcgcacacacaggatgtcgaagccgtttgcggcaatgtctgcacgcagcggacagaatgcttccagcccctgatacagttttgccgggcgcaggttgctgaataatttgaagtgcttacgcagaggcagcagcgcgccgcgttctggttgctggtctggtggtaaatgttcccacttcgggccgcctaccgagccaaacagcacggcatcggcttgctcacaaccttcaaccgtcgcaggcggcagcggctgcccgtggttatcaatggctgcgccgcctacatcgtaatggctggtggtgatgcgcatcgcaaagcggttgcgcacggcatccagcactttcagcgcctgggtcatcacttccggaccaataccgtcccccggcaatacggcaatatggtaattcttcgacatcacacggtttccttgttgttttcgttgtgttgagctttgcgttgcaactctttttcgacttctgcggcgcgccagatattgttcagtacgtgcaccatggctttggcggaggactcgacaatatcggtggccaggccgacgccgtggaagcggcgaccgttgtagttggcgacaatatccacctgacccagagcatctttaccgtgacctttagcagtcaggctgtatttcaccagttcgacgttatagtcagtgatgcggttaattgcctgatagacggcatcgaccggaccgttaccgttggcggcttctgctttgacttcttcgccacaggccagtttgacggcggcggtggcgatatcgttagagccagactgcacgctgaagtaatccagacggaaatgctccggctcttcttgctgcttaccgatgaaggccagcgcctccagatcgtaatcaaacacctgaccttttttgtccgccagcttcaggaaagcatcgtacaaattgtctaaattatattcacnttctttata

SEQ ID NO: 473 - DNA, 1563 bp, Escherichia coli
atctcatccatgcgatgtttcaccgccgcacgccccgaacgagaggtcagattcagctggatttggttcagaccaatagattctggtgtcatgatttcgtagttttcgcggtttttcagcacgccatcctggtggataccggaggagtgagcgaatgcgccgctgccaacaatggctttgtttgccgggatcggcatattacaaatctggctaactaactggctggtgcgccatatctcctggtgattaatggcggtgtggacgttgagaatatccttacgaactttaatcgccatgatgacttcttccagcgaacagttaccggcacgctcgccgatcccgttcattgcaccttccacctggcgtgcaccggcatgtaccgccgccagtgagttgccgaccgccaggcctaaatcgtcgtgggtatgtacggaaataatggctttgtcgatgttaggtacgcgttcatacaggccgctgatgattccggcgaactcaaacggcatggtgtagcccacggtgtccggaatgttgatggtggtggcaccggcattaatcgccgcttcgaccactcgcgccagatcggcaatgggtgtacgcccggcatcttcgcaagaaaattcaacatcatcggtgtaattacgggcgcgtttcaccatatagatagcgcgttcgatcacttcatccagcgtgctgcgcagcttggtggcgatgtgcattggcgaagtggcaataaaggtatgaatacggaaggcttcggcgactttcagggattcggccgccacgtcgatatctttctccacgcagcgagctaacgcacatacgcggctgtttttaacctggcgggcgatggtttgcaccgattcaaaatcgcccggcgaagagacggggaaaccgacttccatcacgtcaacacccatacgctcaagggccagcgcaatttgcagtttttctttcacactcaagcttgcctgtaacgcctgttcaccgtcgcgcaatgtggtatcgaaaataatgacttgctggctcatggtttgggtccttgtctcttttagagcgcctcgcttcgggcataaaaaaacccgcgcaatggcgcgggttttttgtttgactgcgtgctggcttaatgctggatgccgctcactcgtctaccgcgcaaagaagatgcgtttagtagtagtagaccgataaagcgaacgatgtgagtcattaaatcagctccagatgaatgcgatatgcttttagagttactggatacaaaaacggatgtcaaccctgacgcaataaaaacgtcccgccagcgtgagttctgcacccgtaaaattagctaattgtgctgcggtggttaaagtaagcgatattaatttctgcttaactaccgacgcttttcatcggttgacatatttcagcataaatttttgcatctaatcaacgaggaaaaaggggacaaaatgcacgcgttgcaaaacctatcctgatgatttgtattgaattatatgttttgcgattttttttgatattgatttggtgaatattattgatcaattaatgttaagaattaat

SEQ ID NO: 474 - DNA, 131866 bp, Escherichia coli
atatataaattaattattaaataagcacatttaatccattttgtagatgattgagtattcgcggtagttatgattagattgttttcgcaacaaaaacattatggattattatgctgtggtaaatgactcattccacggcaatggattctgtttttatcagaacccgtatctttatgttttccgaattttactcattttgctttttcttattttatatgcatgataaatcatattcttcaggattatttctctgcattccaataagggaaagggagttaagtgtgacagtggagttaagtatgccagaggtacaaacagatcattcagagacggcggagttaagcaagccacagctacgcatggtcgatctcaacttattaaccgttttcgatgccgtgatgcaggagcaaaacattacccgtgccgctcatgttctgggtatgtcgcaacctgcggtcagtaacgctgttgcacgcctgaaggtgatgtttaatgacgagctttttgttcgttatggccgtggtattcaaccgactgctcgcgcatttcaactttttggctcagttcgtcaggcattgcaactagtacaaaatgaattgcctggttcaggttttgaacccgcgagcagtgaacgtgtatttcatctttgtgtttgcagcccgttagacagcattctgacctcgcagatttataatcacattgagcagattgcgccaaatatacatgttatgttcaagtcttcattaaatcagaacactgaacatcagctgcgttatcaggaaacggagtttgtgattagttatgaagacttccatcgtcctgaatttaccagcgtgccattatttaaagatgaaatggtgctggtagccagcaaaaatcatccaacaattaagggcccgttactgaaacatgatgtttataacgaacaacatgcggcggtttcgctcgatcgtttcgcgtcatttagtcaaccttggtatgacacggtagataagcaagccagtatcgcgtatcagggcatggcaatgatgagcgtacttagcgtggtgtcgcaaacgcatttggtcgctattgcgccgcgttggctggctgaagagttcgctgaatccttagaattacaggtattaccgctgccgttaaaacaaaatagcagaacctgttatctctcctggcatgaagctgccgggcgcgataaaggccatcagtggatggaagagcaattagtctcaatttgcaaacgctaactgaatgcagaataggtcaggcatgaatgtctggtttattctgtattttttattgaatgtagaattttattctgaatgtgtgggctctctgttttaggattaattaaaaaaatagagaaattgctgtaagttgtgggattcagccgatttattatcaatttaatccttcgtaatggaggattttatcgtttcttttcacctttcctcctgtttattcttattaccctgcgtttatgtctctggctgccaattgcttaagcaagatcggacggttaatgtgttttacacattttttccgtcaaacagtgaggcaggccatggagatgttgtctggagccgagatggtcgtccgatcgcttatcgatcagggcgttaaacaagtattcggttatcccggaggcgcagtccttgatatttacgatgcattgcataccgtgggtggtatcgatcatgttttagttcgtcatgagcaggcggcagtgcatatggccgatggtctggcgcgcgcgaccggggaagtcggcgtcgtgctggtaacgtcgggtccaggggcgaccaatgcgattaccggcatcgccaccgcttatatggattccattccattagttgtcctttccgggcaggtagcgacctcgttgataggttacgatgcctttcaggagtgcgacatggtggggatttcgcgaccggtggttaaacacagttttctggttaagcaaacggaagacattccgcaggtgctgaaaaaggctttctggctggcggcaagtggtcgcccaggaccagtggtcgttgatttaccgaaagatattcttaatccggcgaacaaattaccctatgtctggcctgagtcggtcagtatgcgttcttacaatcccactactaccggacataaagggcaaattaagcgcgctctgcaaacgctggtagcggcaaaaaaaccggttgtctacgtaggcggtggggcaatcatggcgggctgccatcagcagttgaaagaaacggtggaggcgttgaatctgcccgttgtttcctcattgatggggctgggggcgtttccggcaacgcatcgtcaggcgctgggcatgctgggaatgcacggtacctacgaagccaatatgacgatgcataacgcggatgtgattttcgccgtcggggtacgatttgatgaccgaacgacgaacaatctggcaaagtactgcccaaatgccactgttctgcatatcgatattgatcctacttccatttctaaaaccgtgactgcggatatcccgattgtgggggatgctcgccaggtcctcgaacaaatgcttgaactcttgtcgcaagaatccgcccatcaaccactggatgagatccgcgactggtggcagcaaattgaacagtggcgcgctcgtcagtgcctgaaatatgacactcacagtgaaaagattaaaccgcaggcggtgatcgagactctttggcggttgacgaagggagacgcttacgtgacgtccgatgtcgggcagcaccagatgtttgctgcactttattatccattcgacaaaccgcgtcgctggatcaattccggtggcctcggcacgatgggttttggtttacctgcggcactgggcgtcaaaatggcgttgccagaagaaaccgtggtttgcgtcactggcgacggcagtattcagatgaacatccaggaactgtctaccgcgttgcaatacgagttgccggtactggtggtgaatctcaataaccgctatctggggatggtgaaacagtggcaggacatgatctattccggccgtcattcacaatcttatatgcaatcactacccgatttcgtccgtctggcggaagcctatggtcacgtcgggatccagatctctcatccgcatgagctggaaagcaaacttagcgaggcgctggaacaggtgtgcaataatcgcctggtgtttgttgatgttaccgtcgatggcagtgagcacgtctacccgatgcagattcgcgggggcggaatggatgaaatgtggttaagcaaaacggagagaacctgattatgcgccggatattatcagtcttactcgaaaatgaatcaggcgcgttatcccgcgtgattggccttttttcccagcgtggctacaacattgaaagcctgaccgttgcgccaaccgacgatccgacattatcgcgtatgaccatccagaccgtgggcgatgaaaaagtgcttgagcagatcgaaaagcaattacacaagctggtcgatgtcttgcgcgtgagtgagttggggcagggcgcgcatgttgagcgggaaatcatgctggtgaaaattcaggccagcggttacgggcgtgacgaagtgaaacgtaatacggaaatattccgtgggcaaattatcgatgtcaccccctcgctttataccgttcaattagcaggcaccagcgataagcttgatgcatttttagcatcgattcgcgatgtggcgaaaattgtggaagttgctcgctctggtgtggtcggactttcgcgcggcgataaaataatgcgttgagaatgatctcagtgcgcaatttgcagcccaacatgtcacgttgggctttttttgcgaaatcagtgggaacctggaataaaagcagttgccgcagttaattttctgcgcttagatgttaatgaatttaacccataccagtacaatggctatggtttttacattttacgcaaggggcaattgtgaaactggatgaaatcgctcggctggcgggagtgtcgcggaccactgcaagctatgttattaacggcaaagcgaagcaataccgtgtgagcgacaaaaccgttgaaaaagtcatggctgtggtgcgtgagcacaattaccacccgaacgccgtggcagctgggcttcgtgctggacgcacacgttctattggtcttgtgatccccgatctggagaacaccagctatacccgcatcgctaactatcttgagcgccaggcgcggcaacggggttatcaactgctgattgcctgctcagaagatcagccagacaacgaaatgcgctgcattgagcaccttttacagcgtcaggttgatgccattattgtttcgacgtcgttgccacctgagcatcctttttatcaacgctgggctaacgacccgttcccgattgtcgcgctggaccgcgccctcgatcgtgaacatttcaccagcgtggttggtgccgatcaggatgatgccgaaatgctggcggaagagttacgtaagtttcccgccgagacggtgctttatcttggcgcgctgccggagctttctgtcagcttcctgcgtgaacaaggtttccgtactgcctggaaagatgatccgcgcgaagtgcatttcctgtatgccaacagctatgagcgggaggcggctgcccagttattcgaaaaatggctggaaacgcatccgatgccgcaggcgctgttcacaacgtcgtttgcgttgttgcaaggggtgatggatgtcacgctacgtcgcgatggtaaactgccttctgacctggcaattgccacctttggcgataacgaactgctcgacttcttacagtgcccggtgctggcagtggctcaacgtcaccgcgatgtcgcagagcgtgtgctggagattgtcctggcaagcctggacgaaccgcgtaagccaaaacctggtttaacgcgcattaaacgtaatctctatcgccgcggtgtgctcagccgtagctaagccgcgaacaaaaatacgcgccaggtgaatttccctctgcgcgtagagtacgggaatggacatcaatatccttaaagtaaataagactattcctgactattattgataagttcttttaaacccgcccgttaattaactcaccagctgaaattcacaataattaagtgatatcgacagcgcgtttttgcattattttgttacatgcagagatgaattgccgatttaacaagcacttttctttgcttttgcgcaaacccgctggcatcaagcgccacacagacgcaacagggactgttaaccggggaagatatgtcctaaaatgccgctcgcgtcgcaaactgacactttatatttgctgtggaaaatagtgagtcattttaaaacggtgatgacgatgagggattttttcttacagctattcataacgttaatttgctgcgcacgttggacgtaaaataaacaacgctgatattagccgtaaacatcgggttttttacctcggtatgccttgtgactggcttgacaagcttttcctccgctccgtaaactcctttcagtgggaaattgtggggcaaagtgggaataaggggtgaggctggcatgttccggggagcaacgttagtcaatctcgacagcaaagggcgcttatcagtgcctacccgttaccgggaacagctgcttgagaacgctgccggtcaaatggtttgcaccattgacattcatcacccgtgcctgctgctttaccccctgcctgaatgggaaattatcgagcaaaaattatcgcgtctgtcgagcatgaacccggttgagcgccgtgtgcagcgcctactgttaggtcatgccagcgaatgtcagatggatggcgcaggtcgattgttaatcgcgccagtactgcggcaacatgccgggctgacaaaagaagtgatgctggttggacagttcaacaagtttgagctgtgggatgaaacaacctggcatcaacaggtcaaggaagatatcgacgcagagcagttggctaccggagacttatcggagcgactgcaggacttgtctctataaaatgatggaaaactataaacatactacggtgctgctggatgaagccgttaatggcctcaatatccgtcctgatggcatctacattgatgggacttttggtcgcggtggtcactcacgtctgatcctctcgcagcttggcgaagaggggcgtttgctggcgatcgatcgcgacccgcaggctatcgccgttgcgaagactattgatgatccgcgcttctccatcatccacggacctttctccgcgctgggcgaatacgttgccgagcgcgatcttatcggcaagatcgacggcattctcctcgatcttggcgtctcttcaccgcaacttgatgatgctgagcgcggcttttcctttatgcgcgatggtccgctggacatgcgtatggacccaacccgtgggcagtcagccgctgaatggctacaaaccgcagaagaagccgatatcgcctgggtattgaaaacctatggtgaagagcgttttgccaaacgcattgcccgcgccattgtcgagcgtaaccgcgaacagccgatgacccgcaccaaagaactggcggaagtcgtggctgctgcaacgccggtgaaagataagtttaaacatcccgcgactcgtaccttccaggcggtgcgcatttgggtaaacagtgaactggaggagatagagcaggcgctaaaaagctcgctcaacgtgctggccccgggtgggcggctttcgatcatcagcttccactcgctggaagaccgtattgtgaaacgttttatgcgtgaaaacagccgcggtccgcaagttccggcagggttaccgatgactgaagagcagctcaaaaaactgggtggccgtcagctgcgagcattaggcaagttaatgccgggcgaagaagaggtggctgagaatcctcgtgcccgtagttcagttctgcgtatcgcagagaggacgaacgcatgatcagcagagtgacagaagctctaagcaaagttaaaggatcgatgggaagccacgagcgccatgcattgcctggtgttatcggtgacgatcttttgcgatttgggaagctgccactctgcctgttcatttgcattattttgacggcggtgaccgtggtaaccacggcgcaccatacccgtttactgaccgctcagcgcgaacaactggtgctggagcgagatgctttagacattgaatggcgcaacctgatccttgaagagaatgcgctcggcgaccatagccgggtggaaaggatcgccacggaaaagctgcaaatgcagcatgttgatccgtcacaagaaaatatcgtagtgcaaaaataaggataaacgcgacgcatgaaagcagcggcgaaaacgcagaaaccaaaacgtcaggaagaacatgccaactttattagttggcgttttgcgttgttatgcggctgtattctcctggcgctggcttttctgctcggacgcgtagcgtggttacaagttatctccccggatatgctggtgaaagagggcgacatgcgttctcttcgcgttcagcaagtttccacctcccgcggcatgattactgaccgttctggtcgcccgttagcggtgagcgtgccggtaaaagcgatttgggctgacccgaaagaagtgcatgacgctggcggtatcagcgtcggtgaccgctggaaggcgctggctaacgcgctcaatattccgctggatcagctttcagcccgcattaacgccaacccgaaagggcgctttatttatctggcgcgtcaggtgaaccctgacatggcggactacatcaaaaaactgaaactgccggggattcatctgcgtgaagagtctcgccgttactatccgtccggcgaagtgactgctcacctcatcggctttactaacgtcgatagtcaagggattgagggcgttgagaagagtttcgataaatggcttaccgggcagccgggtgagcgcattgtgcgtaaagaccgctatggtcgcgtaattgaagatatttcttctactgacagccaggcagcgcacaacctggcgctgagtattgatgaacgcctgcaggcgctggtttatcgcgaactgaacaacgcggtggcctttaacaaggctgaatctggtagcgccgtgctggtggatgtcaacaccggtgaagtgctggcgatggctaacagcccgtcatacaaccctaacaatctgagcggcacgccgaaagaggcgatgcgtaaccgtaccatcaccgacgtgtttgaaccgggctcaacggttaaaccgatggtggtaatgaccgcgttgcaacgtggcgtggtgcgggaaaactcggtactcaataccattccttatcgaattaacggccacgaaatcaaagacgtggcacgctacagcgaattaaccctgaccggggtattacagaagtcgagtaacgtcggtgtttccaagctggcgttagcgatgccgtcctcagcgttagtagatacttactcacgttttggactgggaaaagcgaccaatttggggttggtcggagaacgcagtggcttatatcctcaaaaacaacggtggtctgacatagagagggccaccttctctttcggctacgggctaatggtaacaccgttacagttagcgcgagtctacgcaactatcggcagctacggcatttatcgcccactgtcgattaccaaagttgaccccccggttcccggtgaacgtgtcttcccggaatccattgtccgcactgtggtgcatatgatggaaagcgtggcgctaccaggcggcggcggcgtgaaggcggcgattaaaggctatcgtatcgccattaaaaccggtaccgcgaaaaaggtcgggccggacggtcgctacatcaataaatatattgcttataccgcaggcgttgcgcctgcgagtcagccgcgcttcgcgctggttgttgttatcaacgatccgcaggcgggtaaatactacggcggcgccgtttccgcgccggtctttggtgccatcatgggcggcgtattgcgtaccatgaacatcgagccggatgcgctgacaacgggcgataaaaatgaatttgtgattaatcaaggcgaggggacaggtggcagatcgtaatttgcgcgaccttcttgctccgtgggtgccagacgcaccttcgcgagcactgcgagagatgacactcgacagccgtgtggctgcggcgggcgatctctttgtagctgtagtaggtcatcaggcggacgggcgtcgatatatcccgcaggcgatagcgcaaggtgtggctgccattattgcagaggcgaaagatgaggcgaccgacggtgaaatccgtgaaatgcacggcgtaccggtcatctatctcagccagctcaacgagcgtttatctgcactggcgggccgcttttaccatgaaccctctgacaatttacgtctcgtaggcgtaacgggcaccaacggcaaaaccacgactacccagctgctggcgcagtggagccaactgcttggcgaaaccagcgcggtaatgggcaccgttggtaacggtctgcttgggaaagtgatcccgacagaaaatactaccggttccgcagtcgatgttcagcatgagctggcggggctggtggagcagggcgcgacgttttgcgcaatggaagtttcctcccacgggctggtacagcaccgtgtggcggcattgaaatttgcggcgtcggtctttaccaacttaagccgcgatcaccttgattatcatggtgatatggaacactacgaagctgcgaaatggctgctttattctgaacatcattgcggtcaggcgattattaacgccgacgatgaagtgggccgccgctggctggcaaaactgccggacgcggttgcggtatcaatggaagatcatatcaatccgaactgtcacggacgctggttaaaagcgatcgacgtgaactatcacgacagcggtgcgacgattcgctttagctcaagttggggcgatggcgaaattgaaagccatctgatgggcgcttttaacgtcagcaacctgctgctcgcgctggcgacactgctggcactcggctatccactggctgatctgctgaaaaccgccgcgcgtctgcaaccggtttgcggacgtatggaagtgttcactgcgccaggcaaaccgacggtggtggtggattacgcgcatacgccggatgcactggaaaaagccttacaggcggcgcgcctgcactgtgcgggcaagctgtggtgcgtctttggctgtggtggcgatcgcgataaaggtaagcgtccactgatgggcgcaattgccgaagagtttgctgacgtggcggtggtgacggacgataacccgcgtaccgaagaaccgcgtgccatcatcaacgatattctggcgggaatgttagatgccggacatgccaaagtgatggaaggccgtgctgaagcggtgacttgcgccgttatgcaggctaaagagaatgatgtggtactggtcgcgggcaaaggccatgaagattaccagattgttggcaatcagcgtctggactactccgatcgcgtcacggtggcgcgtctgctgggggtgattgcatgattagcgtaacccttagccaacttaccgacattctcaacggtgaactgcaaggtgcagatatcacccttgatgctgtaaccactgatacccgaaaactgacgccgggctgcctgtttgttgccctgaaaggcgaacgttttgatgcccacgattttgccgaccaggcgaaagctggcggcgcaggcgcactactggttagccgtccgctggacatcgacctgccgcagttaattgtcaaggatacgcgtctggcgtttggtgaactggctgcatgggttcgccagcaagttccggcgcgcgtggttgctctgacggggtcctccggcaaaacctccgttaaagagatgacggcggcgattttaagccagtgcggcaacacgctttatacggcaggcaatctcaacaacgacatcggtgtaccgatgacgctgttgcgcttaacgccggaatacgattacgcagttattgaacttggcgcgaaccatcagggcgaaatagcctggactgtgagtctgactcgcccggaagctgcgctggtcaacaacctggcagcggcgcatctggaaggttttggctcgcttgcgggtgtcgcgaaagcgaaaggtgaaatctttagcggcctgccggaaaacggtatcgccattatgaacgccgacaacaacgactggctgaactggcagagcgtaattggctcacgcaaagtgtggcgtttctcacccaatgccgccaacagcgatttcaccgccaccaatatccatgtgacctcgcacggtacggaatttaccctacaaaccccaaccggtagcgtcgatgttctgctgccgttgccggggcgtcacaatattgcgaatgcgctggcagccgctgcgctctccatgtccgtgggcgcaacgcttgatgctatcaaagcggggctggcaaatctgaaagctgttccaggccgtctgttccccatccaactggcagaaaaccagttgctgctcgacgactcctacaacgccaatgtcggttcaatgaccgccgctgttcaggtactggctgaaatgccgggctaccgcgtgctggtggtgggcgatatggcggaactgggcgctgaaagcgaagcctgccatgtacaggtgggcgaggcggcaaaagctgctggtattgaccgcgtgttaagcgtgggtaaacaaagccatgctatcagcaccgccagcggcgttggcgaacattttgctgataaaactgcgttaattacgcgtcttaaatcactgattgctgagcaacaggtaattacgattttagttaagggttcacgtagtgccgccatggaagaggtagtacgcgctttacaggagaatgggacatgttagtttggctggccgaacatttggtcaaatattattccggctttaacgtcttttcctatctgacgtttcgcgccatcgtcagcctgctgaccgcgctgttcatctcattgtggatgggcccgcgtatgattgctcatttgcaaaaactttcctttggtcaggtggtgcgtaacgacggtcctgaatcacacttcagcaagcgcggtacgccgaccatgggcgggattatgatcctgacggcgattgtgatctccgtactgctgtgggcttacccgtccaatccgtacgtctggtgcgtgttggtggtgctggtaggttacggtgttattggctttgttgatgattatcgcaaagtggtgcgtaaagacaccaaagggttgatcgctcgttggaagtatttctggatgtcggtcattgcgctgggtgtcgccttcgccctgtaccttgccggcaaagacacgcccgcaacgcagctggtggtcccattctttaaagatgtgatgccgcagctggggctgttctacattctgctggcttacttcgtcattgtgggtactggcaacgcggtaaacctgaccgatggtctcgacggcctggcaattatgccgaccgtatttgtcgccggtggttttgcgctggtggcgtgggcgaccggcaacatgaactttgccagctatttacacataccgtatctgcgacacgccggggaactggtcattgtctgcacggcgatagtcggggcaggactgggcttcctgtggtttaacacctatccggcgcaggtctttatgggcgatgtaggttcgctggcgttaggtggtgcgttaggcattatcgccgtactgctacgtcaggaattcctgctggtgattatggggggcgtgttcgtggtagaaacgctttctgtcatcctgcaggtcggctcctttaaactgcgcggacaacgtattttccgcatggcaccgattcatcaccactatgaactgaaaggctggccggaaccgcgcgtcattgtgcgtttctggattatttcgctgatgctggttctgattggtctggcaacgctgaaggtacgttaatcatggctgattatcagggtaaaaatgtcgtcattatcggcctgggcctcaccgggctttcctgcgtggactttttcctcgctcgcggtgtgacgccgcgcgttatggatacgcgtatgacaccgcctggcctggataaattacccgaagccgtagaacgccacacgggcagtctgaatgatgaatggctgatggcggcagatctgattgtcgccagtcccggtattgcactggcgcatccatccttaagcgctgccgctgatgccggaatcgaaatcgttggcgatatcgagctgttctgtcgcgaagcacaagcaccgattgtggcgattaccggttctaacggcaaaagcacggtcaccacgctagtgggtgaaatggctaaagcggcgggggttaacgttggtgtgggtggcaatattggcctgccagcgttgatgctgcttgatgctgagtgcgaactgtacgtgctggaactgtcgagcttccagctggaaaccacctccagcttacaggcggtagcagcgaccattctgaacgtgactgaagatcatatggatcgctatccgtttggtttacaacagtatcgtgcagcaaaactgcgcatttacgaaaacgcgaaagtttgcgtggttaatgctgatgatgccttaacaatgccgattcgcggtgcggatgaacgctgcgtcagctttggcgtcaacatgggtgactatcacctgaatcatcagcagggcgaaacctggctgcgggttaaaggcgagaaagtgctgaatgtgaaagagatgaaactttccgggcagcataactacaccaatgcgctggcagcactggcactggcagacgcagctggtttgccgcgcgccagcagcctgaaagcgttaaccaccttcaccggtctgccgcatcgctttgaagtggtgctggagcacaatggcgtacgctggattaacgattcgaaagccactaacgtcggcagtacggaagcggcgttgaatggcttgcaggtagacggcacgctgcatttgttgctgggcggcgatggtaaatcggcggacttcagtccactggcgcgctatctgaatggcgacaacgtgcgtttgtactgttttggtcgtgacggtgcgcagctggcggcgctacgcccggaagtggcagaacaaaccgaaactatggaacaggcgatgcgcttgctggctccgcgtgttcagccgggcgatatggttctgctctccccggcctgtgccagccttgatcagttcaagaactttgaacaacgaggcaatgagtttgcccgtctggcgaaggagttaggttgatgcgtttatctctccctcgcctgaaaatgccgcgcctgccaggattcagtatcctggtctggatctccacggcgctaaaaggctgggtgatgggctcgcgggaaaaagataccgacagcctgatcatgtacgatcgcaccttactgtggctgaccttcggccttgcggcgattggctttatcatggtgacctcggcgtcaatgcccatagggcaacgcttaaccaacgatccgttcttcttcgcgaagcgtgatggcgtctatctgatcctggcattcattctggcgatcattacgctgcgtctgccgatggagttctggcaacgctacagtgccacgatgctgctcggatctatcatcctgctgatgatcgtgctggtagtgggtagctcggttaaaggggcatcgcgttggatcgatctcggtttgctgcgtatccagcctgcggagctgacaaaactgtcgctgttttgttatatcgccaactatctggtgcgtaaaggcgacgaagtacgtaataacctgcgcggcttcctgaaaccgatgggcgtgattctggtgttggcagtgttactgctggcacagccagaccttggtacggtggtggtgttgtttgtgactacgctggcgatgttgttcctggcgggagcgaaattgtggcagttcattgccattatcggtatgggcatttcagcggttgtgttgctgatactcgccgaaccgtaccgtatccgccgtgttaccgcattctggaacccgtgggaagatccctttggcagcggctatcagttaacgcaatcgctgatggcgtttggtcgcggcgaactttggggacaaggtttaggtaactcggtacaaaaactggagtatctgccggaagcgcacactgactttattttcgccattatcggcgaagaactggggtatgtcggtgtggtgctggcacttttaatggtattcttcgtcgcttttcgcgcgatgtcgattggccgcaaagcgttagaaattgaccaccgtttttccggttttctcgcctgttctattggcatctggtttagcttccaggcgctggttaacgtaggcgcggcggcggggatgttaccgaccaaaggtctgacattgccgctgatcagttacggtggttcgagcttactgattatgtcgacagccatcatgatgctgttgcgtattgattatgaaacgcgtctggagaaagcgcaggcgtttgtacgaggttcacgatgagtggtcaaggaaagcgattaatggtgatggcaggcggaaccggtggacatgtattcccgggactggcggttgcgcaccatctaatggctcagggttggcaagttcgctggctggggactgccgaccgtatggaagcggacttagtgccaaaacatggcatcgaaattgatttcattcgtatctctggtctgcgtggaaaaggtataaaagcactgatagctgcgccgctgcgtatcttcaacgcctggcgtcaggcgcgggcgattatgaaagcgtacaaacctgacgtggtactcggtatgggcggctatgtatcaggtccaggtggtctggccgcgtggtcgttaggcattccggttgtacttcatgaacaaaacggtattgcgggcttaaccaataaatggctggcgaagattgccaccaaagtgatgcaggcgtttccaggcgctttccctaatgcggaagtggtgggtaacccggtgcgtaccgatgtgctggcgctgccgttgccgcagcaacgtttggctggacgtgaaggtccggttcgtgtgctggtagtgggtggttcccagggcgcacgcattcttaaccagacaatgccgcaggttgctgcgaaactgggtgattcagtcactatctggcatcagagcggtaaaggttcgcaacaatccgttgaacaggcgtatgccgaagcggggcaaccgcagcataaagtgacggaatttattgatgatatggcggcggcgtatgcgtgggcggatgtcgtcgtttgccgctccggtgctttaacggtgagtgaaatcgccgcggcaggactaccggcgttgtttgtgccgtttcaacataaagaccgccagcaatactggaatgcgctaccgctggaaaaagcgggcgcagccaaaattatcgagcagccacagcttagcgtggatgctgtcgccaacaccctggccgggtggtcgcgagaaaccttattaaccatggcagaacgcgcccgcgctgcatccattccggatgccaccgagcgagtggcaaatgaagtgagccgggctgcccgggcgtaattgtagcgatgccttttgcatcgtatgaatttaagaagttaatggcgtaaagaatgaatacacaacaattggcaaaactgcgttccatcgtgcccgaaatgcgtcgcgttcggcacatacattttgtcggcatcggtggtgccggtatgggcggtattgccgaagttctggccaatgaaggttatcagatcagtggttccgatttagcgccaaatccggtcacgcagcagttaatgaatctgggagcgacgatttatttcaaccatcgcccggaaaacgtacgtgatgccagcgtggtcgttgtttccagcgccatttctgccgataacccggaaattgtcgcagctcatgaagcgcgtattccggtgatccgtcgtgccgaaatgctggctgagttaatgcgttttcgtcatggcatcgccattgcaggaacgcacggcaaaacgacaaccaccgcgatggtttccagcatctacgcagaagcggggctcgacccaaccttcgttaacggcgggctggtaaaagcggcgggggttcatgcgcgtttggggcatggtcggtacctgattgccgaagcagatgagagtgatgcatcgttcctgcatctgcaaccgatggtggcgattgtcaccaatatcgaagccgaccacatggatacctaccagggcgactttgagaatttaaaacagacttttattaattttctgcacaacctgccgttttacggtcgtgcggtgatgtgtgttgatgatccggtgatccgcgaattgttaccgcgagtgggacgtcagaccacgacttacggcttcagcgaagatgccgacgtgcgtgtagaagattatcagcagattggcccgcaggggcactttacgctgctgcgccaggacaaagagccgatgcgcgtcaccctgaatgcgccaggtcgtcataacgcgctgaacgccgcagctgcggttgcggttgctacggaagagggaattgatgacgaggctattttacgtgcgctggagagcttccaggggactgggcgccgttttgatttcctcggtgaattcccgctggagccagtgaatggtaaaagcggtacggcaatgctggtcgatgactacggccaccacccgacggaagttgacgccaccattaaagcggcgcgcgcaggctggccggataaaaacctggtaatgctgtttcagccgcaccgttttacccgtacgcgcgacctgtatgatgatttcgccaatgtgctgacgcaggttgataccctgttgatgctggaagtgtatccggctggcgaagcgccaattccgggagcggacagccgttcgctgtgtcgcacaattcgtggacgtgggaaaattgatcccattctggtgccggaccctgcgcaggtagccgagatgctggcaccggtattaaccggtaacgacctgattctcgttcagggggctggtaatatcggaaaaattgcccgttctttagctgaaatcaaactgaagccgcaaactccggaggaagaacaacatgactgataaaatcgcggtcctgttgggcgggacttccgctgagcgggaagtttctctgaattctggcgcagcggtgttagccgggctgcgtgaaggcggtattgatgcgtatcctgtcgacccgaaagaagtcgacgtgacgcaactgaagtcgatgggttttcagaaagtgtttatcgcgctacacggtcgcggcggtgaagatggtacgctgcagggcatgctcgagctgatgggcttgccttataccggcagcggagtgatggcatctgcgctttcaatggataaactacgcagcaaactgctgtggcaaggtgccggtttaccggtcgctccgtgggttgcgttaacccgcgcagagtttgaaaaaggcctgagtgataagcagttagcagaaatttctgctctgggtttgccggttatcgttaagccgagccgcgaaggttccagtgtgggaatgtcaaaagtagtagcagaaaatgctctacaagatgcattaagattggcatttcagcacgatgaagaagtattgattgaaaaatggctaagtgggccggagttcacggttgcgatactcggtgaagaaattttaccgtcaatacgtattcaaccgtccggaaccttctatgattatgaggcgaagtatctctctgatgagacacagtatttctgccccgcaggtctggaagcgtcacaagaggccaatttgcaggaattagtgctgaaagcatggacgacgttaggttgcaaaggatggggacgtattgacgttatgctggacagcgatggacagttttatctgctggaagccaatacctcaccgggtatgaccagccacagcctggtgccgatggcggcacgtcaggcaggtatgagcttctcgcagttggtagtacgaattctggaactggcggactaatatgtcgcaggctgctctgaacacgcgaaacagcgaagaagaggtttcttctcgccgcaataatggaacgcgtctggcggggatccttttcctgctgaccgttttaacgacagtgttggtgagcggctgggtcgtgttgggctggatggaagatgcgcaacgcctgccgctctcaaagctggtgttgaccggtgaacgccattacacgcgtaatgacgatatccggcagtcgatcctggcattgggtgagccgggtacctttatgacccaggatgtcaacatcatccagacgcaaatagaacaacgcctgccgtggattaagcaggtgagcgtcagaaagcagtggcctgatgaattgaagattcatctggttgaatatgtgccgattgcgcggtggaatgatcaacacatggtagacgcggaaggaaacaccttcagcgtgccgccagatcgcaccagcaagcaggtgcttccaatgctgtatggcccggaaggcagcgccaatgaagtgttgcagggctatcgcgaaatggggcagatgctggcaaaggacagatttactctgaaggaagcggcgatgaccgcgcggcgttcctggcagttgacgctgaataacgatattaagctcaatcttggccggggcgatacgatgaaacgtttggctcgctttgtagaactttatccggttttacagcagcaggcgcaaaccgatggcaaacggattagctacgttgatttgcgttatgactctggagcggcagtaggctgggcgcccttgccgccagaggaatctactcagcaacaaaatcaggcacaggcagaacaacaatgatcaaggcgacggacagaaaactggtagtaggactggagattggtaccgcgaaggttgccgctttagtaggggaagttctgcccgacggtatggtcaatatcattggcgtgggcagctgcccgtcacgtggtatggataaaggcggggtgaacgacctcgaatccgtggtcaagtgcgtacaacgcgccattgaccaggcagaattgatggcagattgtcagatctcttcggtatatctggcgctttctggtaagcacatcagctgccagaatgaaattggtatggtgcctatttctgaagaagaagtgacgcaagaagatgtggaaaacgtcgtccataccgcgaaatcggtgcgtgtgcgcgatgagcatcgtgtgctgcatgtgatcccgcaagagtatgcgattgactatcaggaagggatcaagaatccggtaggactttcgggcgtgcggatgcaggcaaaagtgcacctgatcacatgtcacaacgatatggcgaaaaacatcgtcaaagcggttgaacgttgtgggctgaaagttgaccaactgatatttgccggactggcatcaagttattcggtattgacggaagatgaacgtgaactgggtgtctgcgtcgtcgatatcggtggtggtacaatggatatcgccgtttataccggtggggcattgcgccacactaaggtaattccttatgctggcaatgtcgtgaccagtgatatcgcttacgcctttggcacgccgccaagcgacgccgaagcgattaaagttcgccacggttgtgcgctgggttccatcgttggaaaagatgagagcgtggaagtgccgagcgtaggtggtcgtccgccgcggagtctgcaacgtcagaccctggcagaggtgatcgagccgcgctataccgagctgctcaacctggtcaacgaagagatattgcagttgcaggaaaagcttcgccaacaaggggttaaacatcacctggcggcaggcattgtattaaccggtggcgcagcgcagatcgaaggtcttgcagcctgtgctcagcgcgtgtttcatacgcaagtgcgtatcggcgcgccgctgaacattaccggtttaacggattatgctcaggagccgtattattcgacggcggtgggattgcttcactatgggaaagagtcacatcttaacggtgaagctgaagtagaaaaacgtgttacagcatcagttggctcgtggatcaagcgactcaatagttggctgcgaaaagagttttaatttttatgaggccgacgatgattacggcctcaggcgacaggcacaaatcggagagaaactatgtttgaaccaatggaacttaccaatgacgcggtgattaaagtcatcggcgtcggcggcggcggcggtaatgctgttgaacacatggtgcgcgagcgcattgaaggtgttgaattcttcgcggtaaataccgatgcacaagcgctgcgtaaaacagcggttggacagacgattcaaatcggtagcggtatcaccaaaggactgggcgctggcgctaatccagaagttggccgcaatgcggctgatgaggatcgcgatgcattgcgtgcggcgctggaaggtgcagacatggtctttattgctgcgggtatgggtggtggtaccggtacaggtgcagcaccagtcgtcgctgaagtggcaaaagatttgggtatcctgaccgttgctgtcgtcactaagcctttcaactttgaaggcaagaagcgtatggcattcgcggagcaggggatcactgaactgtccaagcatgtggactctctgatcactatcccgaacgacaaactgctgaaagttctgggccgcggtatctccctgctggatgcgtttggcgcagcgaacgatgtactgaaaggcgctgtgcaaggtatcgctgaactgattactcgtccgggtttgatgaacgtggactttgcagacgtacgcaccgtaatgtctgagatgggctacgcaatgatgggttctggcgtggcgagcggtgaagaccgtgcggaagaagctgctgaaatggctatctcttctccgctgctggaagatatcgacctgtctggcgcgcgcggcgtgctggttaacatcacggcgggcttcgacctgcgtctggatgagttcgaaacggtaggtaacaccatccgtgcatttgcttccgacaacgcgactgtggttatcggtacttctcttgacccggatatgaatgacgagctgcgcgtaaccgttgttgcgacaggtatcggcatggacaaacgtcctgaaatcactctggtgaccaataagcaggttcagcagccagtgatggatcgctaccagcagcatgggatggctccgctgacccaggagcagaagccggttgctaaagtcgtgaatgacaatgcgccgcaaactgcgaaagagccggattatctggatatcccagcattcctgcgtaagcaagctgattaagaattgactggaatttgggtttcgaggctctttgtgctaaactggcccgccgaatgtatagtacacttcggttggataggtaatttggcgagataatacgatgatcaaacaaaggacacttaaacgtatcgttcaggcgacgggtgtcggtttacataccggcaagaaagtcaccctgacgttacgccctgcgccggccaacaccggggtcatctatcgtcgcaccgacttgaatccaccggtagatttcccggccgatgccaaatctgtgcgtgataccatgctctgtacgtgtctggtcaacgagcatgatgtacggatttcaaccgtagagcacctcaatgctgctctcgcgggcctgggcatcgataacattgttatcgaagttaacgcgccggaaatcccgatcatggacggcagcgccgctccgtttgtatacctgctgcttgacgccggtatcgacgagttgaactgcgccaaaaaatttgttcgcatcaaagagactgttcgtgtcgaagatggcgataagtgggctgaatttaagccgtacaatggtttttcgctggatttcaccatcgattttaaccatccggctattgattccagcaaccagcgctatgcgatgaacttctccgctgatgcgtttatgcgccagatcagccgtgcgcgtacgttcggtttcatgcgtgatatcgaatatctgcagtcccgtggtttgtgcctgggcggcagcttcgattgtgccatcgttgttgacgattatcgcgtactgaacgaagacggcctgcgttttgaagacgaatttgtgcgtcacaaaatgctcgatgcgatcggtgacttgttcatgtgtggtcacaatattattggtgcatttaccgcttataaatccggtcatgcactgaataacaaactgctgcaggctgtcctggcgaaacaagaagcctgggaatatgtgaccttccaggacgacgcagaactgccgttggccttcaaagcgccttcagctgtactggcataacgacatttatactgtcgtataaaattcgactggcaaatctggcactctctccggccaggtgaaccagtcgtttttttttgaattttataagagctataaaaaacggtgcgaacgctgttttcttaagcacttttccgcacaacttatcttcattcgtgctgtggactgcaggctttaatgataagatttgtgcgctaaatacgtttgaatatgatcgggatggcaataacgtgagtggaatactgacgcgctggcgacagtttggtaaacgctacttctggccgcatctcttattagggatggttgcggcgagtttaggtttgcctgcgctcagcaacgccgccgaaccaaacgcgcccgcaaaagcgacaacccgcaaccacgagccttcagccaaagttaactttggtcaattggccttgctggaagcgaacacgcgccgcccgaattcgaactattccgttgattactggcatcaacatgccattcgcacggtaatccgtcatctttctttcgcaatggcaccgcaaacactgcccgttgctgaagaatctttgcctcttcaggcgcaacatcttgcattactggatacgctcagcgcgctgctgacccaggaaggcacgccgtctgaaaagggttatcgcattgattatgcgcattttaccccacaagcaaaattcagcacgcccgtctggataagccaggcgcaaggcatccgtgctggccctcaacgcctcacctaacaacaataaacctttacttcattttattaactccgcaacgcggggcgtttgagattttattatgctaatcaaattgttaactaaagttttcggtagtcgtaacgatcgcaccctgcgccggatgcgcaaagtggtcaacatcatcaatgccatggaaccggagatggaaaaactctccgacgaagaactgaaagggaaaaccgcagagtttcgtgcacgtctggaaaaaggcgaagtgctggaaaatctgatcccggaagctttcgccgtggtacgtgaggcaagtaagcgcgtctttggtatgcgtcacttcgacgttcagttactcggcggtatggttcttaacgaacgctgcatcgccgaaatgcgtaccggtgaaggtaaaaccctgaccgcaacgctgcctgcttacctgaacgcactaaccggtaaaggcgtgcacgtagttaccgtcaacgactacctggcgcaacgtgacgccgaaaacaaccgtccgctgtttgaattccttggcctgactgtcggtatcaacctgccgggcatgccagcaccggcaaagcgcgaagcttacgcagctgacatcacttacggtacgaacaacgaatacggctttgactacctgcgcgacaatatggcgttcagccctgaagaacgtgtacagcgtaaactgcactatgcgctggtggacgaagtggactccatcctgatcgatgaagcgcgtacaccgctgatcatttccggcccggcagaagacagctcggaaatgtataaacgcgtgaataaaattattccgcacctgatccgtcaggaaaaagaagactccgaaaccttccagggcgaaggccacttctcggtggacgaaaaatctcgccaggtgaacctgaccgaacgtggtctggtgctgattgaagaactgctggtgaaagagggcatcatggatgaaggggagtctctgtactctccggccaacatcatgctgatgcaccacgtaacggcggcgctgcgcgctcatgcgctgtttacccgcgacgtcgactacatcgttaaagatggtgaagttatcatcgttgacgaacacaccggtcgtaccatgcagggccgtcgctggtccgatggtctgcaccaggctgtggaagcgaaagaaggtgtgcagatccagaacgaaaaccaaacgctggcttcgatcaccttccagaactacttccgtctgtatgaaaaactggcggggatgaccggtactgctgataccgaagctttcgaatttagctccatctacaagctggataccgtcgttgttccgaccaaccgtccaatgattcgtaaagatctgccggacctggtctacatgactgaagcggaaaaaattcaggcgatcattgaagatatcaaagaacgtactgcgaaaggccagccggtgctggtgggtactatctccatcgaaaaatcggagctggtgtcaaacgaactgaccaaagccggtattaagcacaacgtcctgaacgccaaattccacgccaacgaagcggcgattgttgctcaggcaggttatccggctgcggtgactatcgcgaccaatatggcgggtcgtggtacagatattgtgctcggtggtagctggcaggcagaagttgccgcgctggaaaatccgaccgcagagcaaattgaaaaaattaaagccgactggcaggtacgtcacgatgcggtactggaagcaggtggcctgcatatcatcggtaccgagcgtcacgaatcccgtcgtatcgataaccagttgcgcggtcgttctggtcgtcagggggatgctggttcttcccgtttctacctgtcgatggaagatgcgctgatgcgtatttttgcttccgaccgagtatccggcatgatgcgtaaactgggtatgaagccaggcgaagccattgaacacccgtgggtgactaaagcgattgccaacgcccagcgtaaagttgaaagtcgtaacttcgacattcgtaagcaactgctggaatatgatgacgtggctaacgatcagcgtcgcgccatttactcccagcgtaacgaactgctggatgtcagcgatgtgagcgaaaccatcaacagcattcgtgaagatgtgttcaaagcgaccattgatgcctacattccgccacagtcactggaagaaatgtgggatattccggggctgcaggaacgtctgaagaacgatttcgacctcgatttgccaattgccgagtggctggataaagaaccagaactgcatgaagagacgctgcgtgagcgaattctggcgcagtccatcgaagtgtatcagcgtaaagaagaagtggttggtgctgagatgatgcgtcacttcgaaaaaggcgtcatgctgcaaactctcgactctctgtggaaagagcacctggcggcgatggactatctgcgtcagggtatccacctgcgtggctatgcacagaaagatccgaagcaggaatacaaacgtgaatcgttctccatgtttgcagcgatgctggagtcgttaaaatatgaagttatcagcacgctgagcaaagtccaggtacgtatgcctgaagaggttgaggagctggaacaacagcgtcgtatggaagccgagcgtttagcgcaaatgcagcagcttagccatcaggatgacgactctgcagccgcagctgcactggcggcgcaaaccggtgagcgcaaagtaggacgtaacgatccttgcccgtgcggttctggtaaaaaatacaagcagtgccatggtcgcctgcaataaaagctaacagttgaagtaaaaggcgcaggattctgcgccttttttataggtttaagacaatgaaaaagctgcaaattgcggtaggtattattcgcaacgagaacaatgaaatctttataacgcgtcgcgcagcagatgcgcacatggcgaataaactggagtttcccggcggtaaaattgaaatgggcgaaacgccggaacaggcggtggtgcgtgaacttcaggaagaagtcgggattaccccacaacatttttcgctatttgaaaaactggaatatgaattcccggacaggcatataactctgtggttctggctggtcgaaagctgggaaggggagccgtggggtaaagaagggcaacccggtgagtggatgtcgctagtcggtcttaatgccgatgattttccgccagccaatgaaccggtaattgcgaagcttaagcgtctgtaggtcggataaggcgttcacgccgcatccgacatttgcacaagatgcctgatgcgacgctgtccgcgtcttatcaggcctacgtgcggcatcagacaaatgtcactgctttggctcttcgctccaatcatcgctttcggaaagatcgccactgctggggattcgtttttcttcagcagcccattctccgaggtcgatcagctgacaacgtttggagcaaaatggccgaaacgggctgatttcaccccacaccaccgttttcccgcaggttgggcaattcaccgtaatagtttctgacattttcactccttagcaacaggccagttcgaaatccagacgttccggtacctgtccgttttcagtgtccagcggcataaaacgaatggcaaaacggctcttatgtccggaaatttgcggataaagctgtgaatcgagcgacagattcaggcgcagcaagtcggcatcgccaccgttatcctgataaaaaccattcaggctggtttgtttacggaagggggccgactggcgaattaaatccagcaccatggtaagtgcctgggtgagcgggttcaggctggcaatccaggtttctacctggctgtcgcgctgcgcctggggtagatgcagccaaatgtgcaatgtaggtaaatcaaagctgcaacagccgcctgggatgctcagtcgctgacgcaccagagcaatcaaacgatcttcacgcagaaattgcccgatacgcggcgcggaaattaatacgctccccgccgcttttaactgctgaattaatgcttcaatacggctctggtccacgccaggcacgccaatccaggtctggagtttacgttgctgccggtcaagttctttcaacagctcagtgcggacttcgccgcgctcgaaaacatccagtaattcactgacattacggaagaaatgcagcgcgccagcgtggtcaacgatgggtaaattaacggtgagttgctgaatcaaaaactcaatgcgcagccatgtacgcattttttcatttagtggatgttcaaaaaggacctgggtctgcattacggtttttcctgtgagacaaactgcgacgcaagctgcaaatagtgtgcgtgcaggcgggcaacatccgatgcgatagcatccggtgcgccgttattatcaatgacgtcatctgccacggcaaggcgggcttcgcgcgttgcctgagcagcaaggatttgttcgacatgttcgcgagttacatcatcgcgctgcatggtgcgcttaagttgcgtttctgggctgacatccaccaccagcactcgattcgcttttttatacagtgagttttctaccagcaatggcacaacccacagtacatagggggaagttgcttgctggatctggtgttgcgtctcttgctgaatcagcggatgcagcaggtcgttaagccagtttttctcttccgggttggcgaagatccgctcgcgcaaggcccggcgctgcaatgttccatcagcagcaatcatgttagcgccaaagtgatcagcaatggcatgtagcgcaggtgcacctggttcaaccacctgacgcgcaataatatcggcatcaatgacgttaattccgagatcagcaaacgcattggcaacggtactcttgccactgccaatgcctcccgttaaggcaactatatacctcataatttatattcccgggaattcatcatgattatcaaaacgttaaaaatgagcgcacgaaagcgaaattgatgaaacgttcgctcactatttaccaggtaaatttatgggattgtagcgtaaaaaaagacaatttcgcagtcttgcgccgcattgattagtgcgtatgatagcgtcactggagttgcgctcttacccttatagccattaaccccaggaatccgcacatgcgtattgaagaagatctgaagttaggttttaaagacgttctcatccgccctaaacgctccactcttaaaagccgttccgatgttgaactggaacgtcaattcaccttcaaacattcaggtcagagctggtccggcgtgccaattatcgccgcaaatatggacaccgtaggtacattttctatggcctctgcgctggcttcttttgatattttgactgctgtgcataaacactattctgtcgaagagtggcaagcgtttatcaacaattcttccgctgatgtgctgaaacatgtgatggtttctaccggtacgtctgatgcggatttcgaaaaaactaaacagattctcgacctgaacccggcattaaacttcgtttgtattgatgtggcgaatggttattccgaacacttcgtgcagttcgttgcgaaagcgcgtgaagcgtggccgaccaaaaccatttgtgctggcaacgtagtgactggtgaaatgtgtgaggagcttatcctctccggtgctgatatcgttaaagttggcattggcccaggttctgtttgtacaactcgcgtcaaaacaggcgtcggttatccgcagctttctgcggtaatcgaatgtgccgatgcggcgcacggtctgggcggaatgatcgtcagcgacggtggctgcaccacgccgggcgatgtcgcaaaagcctttggcggcggtgccgatttcgtcatgcttggcggcatgctggcgggccacgaagagagcggcggtcgcatcgttgaggagaacggcgagaaatttatgctgttctacggcatgagctccgagtctgcgatgaaacgtcacgttggcggcgttgcggaatatcgcgcagcagaaggtaaaaccgttaagctgccgctgcgaggcccggttgaaaataccgcgcgtgatattttgggcggcctgcgttcagcttgtacatacgttggggcttcacgcctgaaagaactgaccaagcgcaccacatttatccgtgtgcaggaacaagaaaaccgcatcttcaacaacctgtaatcttccaacgctggtgtggagcaacacgccagcgttatcccatcccactcatcgcatcgcctaaatggaaaattggcagatacatcgccaccaccagcgtaccgataattcctcccgttatgatcagcaacgccggttccagtaaggctgcgaggttatccgccagcgccattgtgttatcccgatgatgatgggcgaggttgtctaacatgaggtccagcgagccggatgcctctcctgttctcactaattgcaaacagagcgggctaaactccccggtattttttagcgccagccagatgggatgaccgttactgatatcgtgctggatttgtgtcagaagttgcacccagtacgggcagcgcattgtttctctgacgctctctacgccctgcaaaaaagtaatgcctgcactttgtgtcagcgccagaatcgtaaaaatctgcgtgagtttttgtccccgcatcagtgaacccataatcgggatgcgtaacagcaatttctgccgcactataagccaggtcggtcggcgcatcagcaacttattggctatcgccagcagaaagccgaacaacaccagcagccagctccattcgccactaaagtctgccagcgtcatgatcccctgcgttagtgccggtagtggggtgttgaaggtcttatagatagcggcaaactccggcagaacaaaatgcagcattgccacaaccaccatgattgccatcgctaaaatgatgatgggataacgtaacgctgatttcactttgtcggtcaactgacgctgggctttttgctgacgcgccagttcaaagcagcattcatccagcttaccggtcagttcacccgtgcggatcatcgcctgatagagtggcggaaatacctctgaccagggtaataaggcattggaaaaagcaatgccctgttcgagatcgtgcgccagcgattgcagcaacgcttgccattgcttactgggatgctgttccgccagcagtgccagcccttcagaaagcgttaacccggctttgagtagcgtcgccagttgatgaatgacttccgcgcttttatctcctcgccactgcgcagaattgatggcgattcgcttcaggctaagtggggtaaccatctgttgctgtagtgccatgagcagcaaagcacggctctctgcccatagcatcccatcttgcgcattgccgtcgccggttatgccatgccagcgccagagttgcttactcgccatgcggcatccccagtacgcggattaactcttcaaaggtggttaagccttgctccacggccaggcagccgttttcaaaaagcgtacacatacccgcctgtcgtgcgtgcgtttccagcgattcaacgtcggtattagcggaaataagctgacgaatgaccggcgttatgggcagaacttcaaataaggccgtacgaccataaaaaccgtggtagcaatgtacacaaccgggtgcctgccagtggggcagcggcgacggccatacattgactggaatatggatgggctccccttgctgctggcgacaatgtgggcaaagtttacgtaccagacgctgggctattaccagcgtaagcgctgatgagagcatccagcgggcgactcccatttgctgtaaacgtaccagcgtttcgcaggtggaattagtgtgtagggtagacaacaccaggtgaccagtttgcgccgctttaatagcgatctctgctgtttcgccatcgcggatctctccgatcatgatgacgtcaggatcctggcgcaataacgcacgcaacacgccctgaaaggtgagtccggcacgcggatggatttgcgtctggtttagtccggctatggggatctcaaccggatcttcgacgctacaaatattaatgtcagcggtattcagcgtttgcagggcactataaagcgtgaccgttttgccgctgcctgtagggccagttaccagcaccagtccctgtggttgttgcaaggcatgagcaaagtccgccagttgtaacggctgcattccaagcgtgttgacatccagtgcctgacccacctgctgtaacaaccttaataccaccttttcaccaccccgacatggtaaggtcgcaatacgaaatgagacggcgtttcctgccagttcgacagtgaattgcccgtcctgcggcaggcgatgttccgcaatatccaggtttcccagcacttttaatctggcggttaatgcgactccggcatccggtgaaacatccggtaaaggatgcaatacgccgtcgatacgcaagcggatgcggtaggcattgtccgctggttcgatatgaatatcagacgcgcgttgttccagcgcagattgtaacgttcgagctagcaactctgctttgggctgatgcttctcctgaacagctacgggcaatgtctgttgtgtgcgactggcgtgaccttccatttgttggcgcgtccagcaggtgatctcaatacgtttggtggtagcgaaatgcaatgcgtccagcaactcatgtgagggggcatcgaccaccgcaacatgaaccacttcttcgctggcatccagcaagactccctgataacgcagacacagggccgtgagctgtggaatattcattgccgctccttagttggcgtcatcaaagcggaagacatcttcgcaggcttgctgcaatgcgctgtcactttgaatattgcagttgcgcgtccagccggtgacgccgtttgcgttatcccaacccggtgtcatgacgacgcttagtccattgagactttcttgcccggtcagcgacaccacgccttttgccacactcatggctgaaacatagtgggtggtggtaggcgagggaatgccattgctgccaccgtcgcaggtatctaatccaccatgttccagcgcgcacaactctacggcggtacggtaaggcacaaaggtttgtagcatgtcggtgagtgcggctttgcgcaggtagttttgataagcgggaataccaatggcgcttaaaatggcaatgatgccaataaccaccatcagttcgataagtgtaaaaccgcgttgcttgtccatctgtttcgctccttgatttggttggcgctactttggcaaacgccatcagcacaggcgaggggcaaaaaacgaaacgggaaagcagattccgaggttttttatttcgttgcagcgaaagacaagaaatttgcgaggcgttacgaagaaagttggggaaggggagattatccgcccgcgatggagcggataaatctgtcaactattagcgaaaacgcattgaaaggtcgagtgcttgtacgtgtttagttagcgcaccgacggagataaagtccacgcccgtttcggcaaattcacgcagtgttttgtcagtgacgttgccagacacttccagtagcgccttgccgttggtgcgtttgacggcttcgcgcatctgttctgtttcgaagttatccagcatgatgatatcggctcctgctttcagggcttcatcaagttcttccagattctctacttcgacttctactggcgcatccgggtgcagccaggacgctttttcgaccgcctggcgcactgagccggaggcaataatatggttttctttgatcaggaaggcatcagaaagccccagacggtgattcgctccgccgccgcaaagtaccgcgtatttcagagctgaacgcaggccgggtaaggttttgcgcgtatccaacaactgcgtgttggtgccttccagcaattcgacatagtggcgtaccttactggcaactcctgaaagggtttgcacaaaattaagcgcagtgcgttcgcccgttaacagcacgcgggatgggccttcaagttcgaacaaggattgattggcattgatgacatcgccgtcatccacatgccagattatggtgacatcgtcgcctgccagttgaataaacacctcttcaacccagcgtttgccgcaaaagacgccattctcgcgggtgatcaccgtggcatgagagcgagaattttccggtaaaagttttgccgtaatatcattgttggcatcgactgttccgcctaaatcttcccgcagcgcctgggctaccgcgccggggatatcgagattaatgcgttccagcagctcgtcacgtcgggtgtcagggttatagcggcgaggcggcatgttaaaactccagatagctaacgaatcataaggtagaaacatgctactctgaaccgggtattagcaccacatataaggagatcctgcatgttgttagaacaggggtggctggttggcgcgcgccgcgttccctcaccacattacgattgccgcccggatgacgaaacacccaccctgctggtggtgcacaatattagcctgccgccaggcgagtttggcggtccgtggatcgacgcattattcactggaactattgatccgcaggcacatcctttctttgctgagatcgcccatttgcgcgtctccgctcactgtttgattcgccgtgatggtgaaatagtccagtatgttcctttcgataaacgtgcatggcatgcgggagtctctcagtatcaggggcgcgaacgctgcaatgatttttctattgggattgagcttgaaggcaccgatacgctggcgtataccgatgcgcagtatcaacagcttgcggcggttacgcgggcactgattgattgctatccggatatcgctaaaaacatgacgggccattgtgatattgcgccggatcggaaaaccgatcccggtcctgcatttgattgggcacggtttcgtgtgctggtcagcaaggagacaacatgacgctatttacaaccttactggtgttaattttcgagcgcctgtttaagttgggcgagcactggcagcttgatcatcgtcttgaagcgttctttcggcgggtgaaacatttttctctcgggcgcacgttaggcatgaccattattgcgatgggcgtgacttttttactgttacgcgcattgcagggagtattgttcaacgttcccacgctactggtgtggctgctgattggtttgctgtgtattggcgcaggtaaagttcgtcttcattatcatgcttatctgacagctgcttcacgtaatgatagccatgcccgtgccacgatggctggcgaactcaccatgattcacggcgtcccggcaggctgcgacgaacgtgagtatttgcgtgagctgcaaaatgcattgctgtggattaactttcgtttttatcttgcaccgctgttctggctgattgtggggggaacctggggacccgttacgctgatggggtatgcgtttttgcgtgcatggcaatactggctggcgcgatatcagacgccgcatcatcgtttacagtccggcattgatgccgtgcttcatgtactggattgggtgccggttcgtcttgcgggtgtggtatatgccttgatcggtcatggtgagaaagcgttaccggcctggtttgcttcgctgggtgatttccatacttcgcagtatcaggtgttaacgcgtctggcgcagttctctctggcgcgtgaaccgcatgtcgataaggtggagacgccgagggcagcggtttcaatggcgaagaaaacctcgttcgtggtcgtggtggtgattgcactactgacgatttacggggcgttggtgtaaagattattgccctcaccctgtacgggtgagggcgtagagagattaatgcgcttttacggctttggcggttttctctttaaacagatagccgatacctaacacgatcagccataccgggatcaggtataccgaaatcgccattcctggggtcatcagcataatcaccagtaccgccgccataaacagcaggcagatccagttacccagcggataaagcagagcagggaagtgagttaccacgccttgttcctgcttggcgcgacggaatttcatatgcgccaggctaatcatcgcccagttgattaccagtgcagataccaccagcgccattaacagtccgaaagcggactctggggcaaggtagttaatcagtacgcacaacgccgttaccagtgcagacaccagaatggtatttactggtacaccacgtttatcgacagacgccagcgcttttggcgcattaccctgttgtgccagaccaaacagcatacggctgttgcaatatacgcagctgttgtacacggagagcgccgcagtcagtaccacgatgttcagcgcattcgccacaaaggtatcgcctaactcgtggaagatcagcacaaacggactggtatcggcggtaacgcgggtccacggcatcagtgagagcagaacggctaacgaaccaatatagaaaatcaggatgcggtagataacctggttagttgctttcggtatactttgctccgggttatcagcttctgctgcggtgatccccaccagttccagaccaccgaacgagaacatgataatcgccatcatcatcaccagcccggtgaagccgtgcggcaggaaaccaccctgatcccacaggttgctaacggtcgcctgcgggccgccgttgccactgaatagcagccagccgccgaagatgatcatcgctaccaccgcgataactttgataatggcaaaccagaactccatctcgccaaacactttaacgttggtcaggttgatggcgttaatcaccacaaagaatacggcggcagaaacccaggtggggatttccggataccagaactgaatgtatttacccacggcagtcagctcagccatggcaactaaaacgtacagtacccagtagttccagccagaggcgaaaccggcaaaactgccccagtatttataagcaaagtggctaaaggagcctgcgacaggttcttcgaccaccatttcacccagctgacgcatgatcagaaaggcgataaaaccagcaatggcgtaacccaggataatccctggccctgcggactgtattacggaggcgctacccaggaataacccggtccctatcgcgccacccagcgcgataagctgaatatggcggtttttaaggccgcgctttagctgctcgccgtgctgttgaccttccatcatgaaacctcgtgcggtggttgtttttttgatctacgcagtgatgcgtgtgtaagtttgcaattccgtttgttgtattaatttgtttacatcaaagaagtttgaattgttacaaaaagacttccgtcagatcaagaataatggtatgcagcagcgaatgcacccgctttatgcatggttgaagatgagttgcttaaaaagaaaccgtttgtaaagctcagcctcaacccctctcaatatgtagaatgaatttaaattcgttttaattgaattaaaaatcacaaaattggtaagtgaatcggttcaattcggatttttatagtttaataatcgttaaaaaactcctttcctacgtaaagtctacatttgtgcatagttacaactttgaaacgttatatatgtcaagttgttaaaatgtgcacagtttcatgatttcaatcaaaacctgtatggacataaggtgaatactttgttactttagcgtcacagacatgaaattggtaagaccaattgacttcggcaagtggcttaagacaggaactcatggcctacagcaaaatccgccaaccaaaactctccgatgtgattgagcagcaactggagtttttgatcctcgaaggcactctccgcccgggcgaaaaactcccaccggaacgcgaactggcaaaacagtttgacgtctcccgtccctccttgcgtgaggcgattcaacgtctcgaagcgaagggcttgttgcttcgtcgccagggtggcggcacttttgtccagagcagcctatggcaaagcttcagcgatccgctggtggagctgctctccgaccatcctgagtcacagtatgacttgctcgaaacacgacacgccctggaaggtatcgccgcttattacgccgcgctgcgtagtaccgatgaagacaaggaacgcatccgtgaactccaccacgccatagagctggcgcagcagtctggcgatctggacgcggaatcaaacgccgtactccagtatcagattgccgtcaccgaagcggcccacaatgtggttctgcttcatctgctaaggtgtatggagccgatgttggcccagaatgtccgccagaacttcgaattgctctattcgcgtcgcgagatgctgccgctggtgagtagtcaccgcacccgcatatttgaagcgattatggccggtaagccggaagaagcgcgcgaagcatcgcatcgccatctggcctttatcgaagaaattttgctcgacagaagtcgtgaagagagccgccgtgagcgttctctgcgtcgtctggagcaacgaaagaattagtgatttttctggtaaaaattatccagaagatgttgtaaatcaagcgcatataaaagcgcggcaactaaacgtagaacctgtcttattgagctttccggcgagagttcaatgggacaggttccagaaaactcaacgttattagatagataaggaataacccatgtcagaacgtttcccaaatgacgtggatccgatcgaaactcgcgactggctccaggcgatcgaatcggtcatccgtgaagaaggtgttgagcgtgctcagtatctgatcgaccaactgcttgctgaagcccgcaaaggcggtgtaaacgtagccgcaggcacaggtatcagcaactacatcaacaccatccccgttgaagaacaaccggagtatccgggtaatctggaactggaacgccgtattcgttcagctatccgctggaacgccatcatgacggtgctgcgtgcgtcgaaaaaagacctcgaactgggcggccatatggcgtccttccagtcttccgcaaccatttatgatgtgtgctttaaccacttcttccgtgcacgcaacgagcaggatggcggcgacctggtttacttccagggccacatctccccgggcgtgtacgctcgtgctttcctggaaggtcgtctgactcaggagcagctggataacttccgtcaggaagttcacggcaatggcctctcttcctatccgcacccgaaactgatgccggaattctggcagttcccgaccgtatctatgggtctggggccgattggtgctatttaccaggctaaattcctgaaatatctggaacaccgtggcctgaaagatacctctaaacagaccgtttacgcgttcctcggcgacggtgaaatggacgaacctgaatccaaaggtgcgatcaccatcgctacccgtgaaaaactggataacctggtcttcgttatcaactgtaacctgcagcgtcttgacggcccggtcaccggtaacggcaagatcatcaacgaactggaaggcatcttcgaaggtgctggctggaacgtgatcaaagtgatgtggggtagccgttgggatgaactgctgcgtaaagataccagcggtaaactgatccagctgatgaacgaaaccgttgacggcgactaccagaccttcaaatcgaaagatggtgcgtacgttcgtgaacacttcttcggtaaatatcctgaaaccgcagcactggttgcagattggactgacgagcagatctgggcactgaaccgtggtggtcacgatccgaagaaaatctacgctgcattcaagaaagcgcaggaaaccaaaggcaaagcgacagtaatccttgctcataccattaaaggttacggcatgggcgacgcggctgaaggtaaaaacatcgcgcaccaggttaagaaaatgaacatggacggcgtgcgtcacatccgcgaccgtttcaatgtgccggtgtctgatgcagatatcgaaaaactgccgtacatcaccttcccggaaggttctgaagagcatacctatctgcacgcacagcgtcagaaactgcacggttatctgccaagccgtcagccgaacttcaccgagaagcttgagctgccgagcctgcaagacttcggcgcgctgctggaagagcagagcaaagagatctctaccactatcgctttcgttcgtgccctgaacgtaatgctgaagaataagtcgatcaaagatcgtctggtaccgatcatcgccgacgaagcgcgtactttcggtatggaaggtctgttccgtcagattggtatttacagcccgaacggtcagcagtacaccccgcaggaccgcgagcaggttgcttactataaagaagacgagaaaggtcagattctgcaggaagggatcaacgagttgggcgcaggttgttcctggctggcagcggcgacctcttacagcaccaacaatctgccgatgattccgttctacatctattactcgatgttcggcttccagcgtatcggcgatctgtgctgggcggctggcgaccagcaagcgcgtggcttcctgatcggcggtacttccggtcgtaccaccctgaacggtgaaggtctgcagcacgaagatggtcacagccacattcagtcgctgactatcccgaactgtatctcttacgacccggcttacgcttacgaagttgctgtcattatgcatgacggtctggagcgtatgtacggtgaaaaacaagagaacgtttactactacatcactacgctgaacgaaaactaccacatgccggcaatgccggaaggtgctgaggaaggtatccgtaaaggtatctacaaactcgaaaccattgaaggtagcaaaggtaaagttcagctgctgggctccggttccatcctgcgtcacgtccgtgaagcggcagagatcctggcgaaagattacggcgtaggttctgacgtttatagcgtgacctccttcaccgaactggcgcgagatggtcaggattgtgaacgctggaacatgctgcacccgctggaaactccgcgcgttccgtatatcgctcaggtgatgaacgacgctccggcagtggcatctaccgactatatgaaactgttcgctgagcaggtccgtacttacgtaccggctgacgactaccgcgtactgggtactgatggcttcggtcgttccgacagccgtgagaacctgcgtcaccacttcgaagttgatgcttcctacgtggttgtagcggcgctgggcgaactggctaaacgtggcgaaatcgataagaaagtggttgctgacgcaatcgccaaattcaacatcgatgcagataaagttaacccgcgtctggcgtaagaggtaaaagaataatggctatcgaaatcaaagtaccggacatcggggctgatgaagttgaaatcaccgagatcctggtcaaagtgggcgacaaagttgaagccgaacagtcgctgatcaccgtagaaggcgacaaagcctctatggaagttccgtctccgcaggcgggtatcgttaaagagatcaaagtctctgttggcgataaaacccagaccggcgcactgattatgattttcgattccgccgacggtgcagcagacgctgcacctgctcaggcagaagagaagaaagaaacagctccggcagcagcaccagcggctgcagcggcaaaagacgttaacgttccggatatcggcagcgacgaagttgaagtgaccgaaatcctggtgaaagttggcgataaagttgaagctgaacagtcgctgatcaccgtagaaggcgataaagcttctatggaagttccggctccgtttgctggcaccgtgaaagagatcaaagtgaacgtgggtgacaaagtgtctaccggctcgctgattatggtcttcgaagtcgcgggtgaagcaggcgcggcagctccggcggctaaacaggaagcggctccggcagcggcccctgcaccagcggctggcgtgaaagaagttaacgttccggatatcggcggtgacgaagttgaagtgaccgaagtgatggtgaaagtgggcgacaaagttgccgctgaacagtcactgattaccgtagaaggcgacaaagcttctatggaagttccggctccgtttgcaggcgtcgtgaaggaactgaaagtcaacgttggcgataaagtgaaaactggctcgctgattatgatcttcgaagttgaaggcgcagcgcctgcggcagctcctgcgaaacaggaagcggcagcgccggctccggcagcaaaagctgaagctccggcagcagcaccggctgcgaaagcggaaggcaaatctgaatttgcagaaaacgacgcttacgttcacgcgactccgctgatccgccgtctggcacgcgagtttggcgttaacctggcgaaagtgaagggcactggccgtaaaggtcgtatcctgcgcgaagacgttcaggcttacgtgaaagaagctatcaaacgtgcagaagcagctccggcggcgactggcggcggtatcccaggcatgctgccgtggccgaaggtggacttcagcaagtttggtgaaatcgaagaagtggaactgggccgtatccagaaaatttctggtgcgaacctgagccgtaactgggtgatgatcccgcatgttactcacttcgacaaaaccgatatcaccgagctggaagcgttccgtaaacagcagaacgaagaagcggcgaaacgtaagctggatgtgaagatcaccccggttgtcttcatcatgaaagccgttgctgcagctcttgagcagatgcctcgcttcaacagttcgttgtcggaagacggtcagcgtctgaccctgaagaaatacatcaacatcggtgtggcggtggataccccgaacggtctggttgttccggtattcaaagacgtcaacaagaaaggcatcatcgagctgtctcgcgagctgatgactatttctaagaaagcgcgtgacggtaagctgactgcgggcgaaatgcagggcggttgcttcaccatctccagcatcggcggcctgggtactacccacttcgcgccgattgtgaacgcgccggaagtggctatcctcggcgtttccaagtccgcgatggagccggtgtggaatggtaaagagttcgtgccgcgtctgatgctgccgatttctctctccttcgaccaccgcgtgatcgacggtgctgatggtgcccgtttcattaccatcattaacaacacgctgtctgacattcgccgtctggtgatgtaagtaaaagagccggcccaacggccggcttttttctggtaatctcatgaatgtattgaggttattagcgaatagacaaatcggttgccgtttgttgtttaaaaattgttaacaattttgtaaaataccgacggatagaacgacccggtggtggttagggtattacttcacataccctatggatttctgggtgcagcaaggtagcaagcgccagaatccccaggagcttacataagtaagtgactggggtgagggcgtgaagctaacgccgctgcggcctgaaagacgacgggtatgaccgccggagataaatatatagaggtcatgatgagtactgaaatcaaaactcaggtcgtggtacttggggcaggccccgcaggttactccgctgccttccgttgcgctgatttaggtctggaaaccgtaatcgtagaacgttacaacacccttggcggtgtttgcctgaacgtcggctgtatcccttctaaagcactgctgcacgtagcaaaagttatcgaagaagccaaagcgctggctgaacacggtatcgtcttcggcgaaccgaaaaccgatattgacaagattcgtacctggaaagagaaagtgatcaatcagctgaccggtggtctggctggtatggcgaaaggccgcaaagtcaaagtggtcaacggtctgggtaaatttaccggggctaacaccctggaagttgaaggtgagaacggtaaaaccgtgatcaacttcgacaacgcgatcattgcagcgggttctcgcccgatccaactgccgtttattccgcatgaagatccgcgtatctgggactccactgacgcgctggaactgaaagaagtaccagaacgcctgctggtaatgggtggcggtatcatcggtctggaaatgggcaccgtataccacgcgctgggttcacagattgacgtggttgaaatgttcgaccaggttatcccggcagctgacaaagacatcgttaaagtcttcaccaagcgtatcagcaagaaattcaacctgatgctggaaaccaaagttaccgccgttgaagcgaaagaagacggtatttatgtgacgatggaaggcaaaaaagcacccgctgaaccgcagcgttacgacgccgtgctggtagcgattggtcgtgtgccgaacggtaaaaacctcgacgcaggcaaagctggcgtggaagtggacgaccgtggtttcatccgcgttgacaaacagctgcgtaccaacgtaccgcacatctttgctatcggcgatatcgtcggtcagccgatgctggcacacaaaggtgttcacgaaggtcacgttgccgctgaagttatcgccggtaagaaacactacttcgatccgaaagttatcccgtccatcgcctataccgaaccagaagttgcatgggtaggtctgactgagaaagaagcgaaagagaaaggcatcagctatgaaaccgccaccttcccgtgggctgcttctggtcgtgctatcgcttccgactgcgcagacggtatgaccaagctgattttcgacaaagaatctcaccgtgtgatcggtggtgcgattgtcggtaccaacggcggcgagctgctgggtgaaatcggcctggcaatcgaaatgggttgtgatgctgaagacatcgcactgaccatccacgcgcacccgactctgcacgagtctgtgggcctggcggcagaagtgttcgaaggtagcattaccgacctgccgaacccgaaagcgaagaagaagtaattgttcgtttgccggaacatccggcaattaaaaaagcggctaaccacgccgctttttttacgtctgcaatttacctttcctgtcgccttgctccgcgctcagagagacgttcgcgtactgctgaccgttgctcgttattcagcctgacagtatggttactgtcgtttagacgttgtgggcggctctcctgaactttttcccgaaaaacctgacgttgttcaggtgatgccgattgtatacgctggcgggcgttatcacgttgctgttggttcagtgggcgctgctgtacttttccttaaatacctggcgctgttcgggagttgcagactgaatacgctcacgcgctgcctctcttcgctgctggttctgtgggttagtctgcattttctcgcgaaccgcctggcgctgctcaggcgaggcggactgataacgctgacgagcggcgtccttttgttgctgggtcaggggttggcgacggctgaagtcgcggaagtcgtcatagctcccatagtgttcagcttcattaaaccgctgtgccgctgcctgacgttgggtatctcgtgtaatgacgggggcggcgtgtgttcgttgctgaaactgacttgctgccgcctgacgctggctgtcgcgtgttggagcaggtagctgcgtggcactcattccgccgttgacatcggtttgatgaaaccgctttgccatatcctgatcatgatagggcacaccattacggtagtttggattgtgccgccatgccatattcttatcagtaagatgctcaccggtgatacggttgaaattgttgacgtcgatattgatgttgtcgccgttgtgttgccagccattaccgtcacgatgaccgccatcgtggtgatgataatcatcatcgtcatgatgatgatggtcatgatcgtcgtcgtcccagtcgatgctgctgaatagtgcgtacgtggtagcaacacccatgctatagccgaatccgcgcacaaagctgtcaataaacggttctccggctggtggtggcagataaaccggcggatacgcagtattggcccagttcccgtaaaccacggttgggttgtagttgggaatatagaccacatcaggattggcgggctcaatggaaatgacggttgttgcaggctctgtaatgatggggctggcagttgaaacggtattggatggtatgacgggagccgtgactgtctgtgttaccggtacagctttcttcgttgtggtaataactttctgttcggttgatgacttcagcgagccggtttgttgcgccagttgccgcaatcgctgtaccgagtccatcacgtcctgcggctgcgccagaaaagcatcgcccaggttttgcacccattgcgggttttcgcccatcaatgccatcaattgtggaaaggccaccagtgatttaacgctggcgtcccacggctggtcagatactgcctgaatagcagcatcgccttgtttaagtggattatcgtgcgaccattgcactgcttgagcaacgtttgccggataggttgatgccattaacacttgtgaaagcagagaatcggggtacagcgcgacaggcgcaacccattgatcgatttgtgcagtgctgaatgcggatttgacgacggcgggcgttacgggcggtgcggaaaccgttgcaggaagcgtaactgcggtgatgtcaggcgcagtctgttgtgtcgattgcggttccacaggcgcttccactgtgcggctttttatatatagcccggtagaggcggcacaaagcccggcactgcaaattagcgccagcacatggggtttaaacggcaaagtcattttcataattcggatctcaaggaaatcgcaatggtcggcgaactgccacccgcaggtgctgtgaatccgagtataaagaggcggtagtttaaattttgactaatcttgggattcgttgagaaaggtgattatcaccatgcgaattaacgaagtttttacggagggaaacaatctctagaccatccttaacgattcagccacttttttatgttgcttttttgtaaacagattaacacatcgtcaaaatcctgctattctgcccgttgcggtactgggcatttaccctacaaactgctgtctcacaggagcgtgaagagaatcgcctgccgcactatgacaatgagagcgaggagaaccgtcgtgctagaagaataccgtaagcacgtagctgagcgtgccgctgaggggattgcgcccaaacccctggatgcaaaccaaatggccgcacttgtagagctgctgaaaaacccgcccgcgggcgaagaagaattcctgttagatctgttaaccaaccgtgttccccctggcgtcgatgaagccgcctatgtcaaagcaggcttcctggctgctatcgcgaaaggcgaagccaaatcccctctgctgactccggaaaaagccatcgaactgctgggcaccatgcagggtggttacaacattcatccgctgatcgacgcgctggatgatgccaaactggcaccgatcgctgccaaagcactttctcacacactgctgatgttcgataacttctatgacgtagaagagaaagcgaaagcaggcaacgaatatgcgaagcaggtaatgcagtcctgggcggatgccgaatggttcctgaatcgcccggcgctggctgaaaaactgaccgttaccgtcttcaaagtcactggcgaaactaacaccgatgacctttctccggcaccggatgcgtggtcacgcccggatatcccactgcacgcgctggcgatgctgaaaaacgcccgtgaaggtattgagccagaccagcctggtgttgttggtccgatcaagcaaatcgaagctctgcaacagaaaggtttcccgctggcgtacgtcggtgacgttgtgggtacgggttcttcgcgtaaatccgccactaactccgttctgtggtttatgggcgatgatattccacatgtgccgaacaaacgcggcggtggtttgtgcctcggcggtaaaattgcacccatcttctttaacacgatggaagacgcgggtgcactgccaatcgaagtcgacgtctctaacctgaacatgggcgacgtgattgacgtttacccgtacaaaggtgaagtgcgtaaccacgaaacaggcgaactgctggcgaccttcgaactgaaaaccgacgtgctgattgatgaagtgcgtgctggcggccgtatcccgctgattatcgggcgtggcctgaccaccaaagcgcgtgaagcacttggtctgccgcacagtgatgtgttccgtcaggcgaaagatgtcgctgagagcgatcgcggcttctcgctggcgcagaaaatggtaggccgtgcctgtggcgtgaaaggcattcgtccgggcgcgtactgcgaaccgaaaatgacttctgtaggctctcaggacaccaccggcccgatgacccgtgatgaactgaaagacctggcgtgcctgggcttctcggctgacctggtgatgcagtctttctgccacaccgcggcgtatccgaagccagttgacgtgaacacgcaccacacgctgccggacttcattatgaaccgtggcggtgtgtcgctgcgtccgggtgacggcgtaatccactcctggctgaaccgtatgctgctgccggataccgtcggtaccggaggtgactcccatacccgtttcccgatcggtatctctttcccggcgggttctggtctggtggcatttgcagccgcaacaggcgtaatgccgctggatatgccggaatccgttctggtgcgcttcaaaggcaaaatgcagccgggcatcaccctgcgcgatctggtacacgcgatcccgctgtatgcgatcaaacaaggtctgctgaccgttgagaagaaaggcaagaaaaacatcttctctggtcgcattctggaaattgaaggtctgccggatctgaaagttgagcaggcatttgaactgaccgatgcgtccgctgagcgttctgccgctggttgtactatcaagctgaacaaagaaccgatcatcgaatacctgaactctaacatcgtcctgctgaagtggatgatcgcggaaggttatggcgatcgtcgtaccctcgaacgtcgtattcagggcatggaaaaatggctggcgaatcctgagctgctggaagccgatgcagatgcggaatacgcggcagtgattgacatcgatctggcggatattaaagagccaatcctgtgtgctccgaacgacccggatgacgcgcgtccgctgtctgcggtacagggcgagaagatcgacgaagtatttatcggttcttgcatgactaacatcggtcacttccgtgctgcgggtaaactgctggatgcgcataaaggccagttgccgacccgcctgtgggtggcaccgccaacccgtatggatgccgcgcagttgaccgaagaaggctactatagcgtcttcggtaagagcggtgcgcgtatcgagatccctggctgttccctgtgtatgggtaaccaggcgcgtgtagcagacggtgcgacggtggtttccacctctacccgtaacttcccgaaccgtctggggactggcgcgaatgtcttcctggcttctgcagaactggcggctgttgcggcgctgattggcaaactgccgacgccggaagagtaccagacctacgttgcgcaagtagataaaactgccgttgatacttatcgttatctgaacttcaaccagctttctcagtacaccgaaaaagccgatggggtgattttccagactgcggtgtaataagtaagcgcacgcgctgcgcataaacgacacaatgcccggtgaatgagattcccgggcatttttttatttctaaaccatcgccgttccgctgtttttctccggtaaggctgcgataattacatcaatggcgcaatgcgatttcggcgcattgccaggagcagaggaacacactatggattacgaatttctgcgcgatattaccggagttgtaaaggtgcgtatgtccatggggcatgaagtggtcgggcactggtttaatgaagaggtgaaagaaaacctggccttgcttgatgaagtggaacaagcggcgcacgcactgaaaggtagcgaacgttcctggcagcgggcagggcatgagtacactctgtggatggacggtgaagaggtgatggttcgcgccaatcaactggaattcgctggcgatgaaatggaagaggggatgaactactacgacgaagaaagcctgtcgctatgcggcgttgaggattttctgcaggtcgtggcggcttaccgtaatttcgtgcagcagaagtaaataaatctggcggagcctgggagctccgcccgagacgttaaacagctggcatattgcgcccgtaataaatctcgcgcatttctttccacagcgcagcggtaatttcctggcgctcgctgtcggttaaatcttccggtttggtgtggaacatgtagtgcttaaggtcgaactctttaagcaacatcttggtatggaagatattttcctgatagacgtttacatccaccatgtcatacagcgccttcatatcgtcagacataaagttctgaatcgaattaatctcatggtcgataaagtgcttcataccgttaatgtcgcgggtaaaaccgcgcacgcgataatcaatggttacgatatcggactcaagctggtggatcaggtaattcagcgccttcagcggagaaatcacgccgcaggtagagacttcaatatcggcgcggaaggtacataaaccgccttcaggatgactttccgggtaggtatgtacgcaaatatgacttttatcgagatgggcaacgaccgtttctggcagtgggccggggtgttctgttttgtcgatgagtttcgggtcaaccggttcttcactcaccagaatagtgacgctggcaccctgtggttcgtaatcctggcgggcgatgttaagaatattggccccgataatggaacaggtttctgacaggatttcggtcagacggttggcattatagagttcatcgatataagcaatataaccgtcgcgctcttcggcagttttggcgtagcagatatcgtaaatacaaaaactcagacttttggtcagattattaaagccatgcagtttcagttttttcaatttcttatcttctccttaggacggctgtgaagccagtgcgtcttgcagatactgaggtaaggcaaaagctgccgtatggattgccggattgtaataacggcatttcaggccagaggcgagaaaacgcgcctgaataatttcggttgagagatggcgtaaggcgtcgttatctgtcgcccatgcaaaagtcatgataccgccgtaataggtcgggatcgccgcctgataaaagccaacgtcgctgaagtaatggctgagtttgcgatggctgtcgatggcttcttcctgctgtaaaaagcagacgccgttttgtgcgacgaagataccgccaggattcaggcaacgtttgcagccttcataaaatgccgaagtgaaaaggctttcgccgggaccgataggatcggtgcagtcggagataatgacatcaaaggtctggctggtttgattaacgaaattgacgccatcgtcgatcaccagcttaaagcgcggatcgtcgtagctaccggcgttatggttgggtagatactgacggcagaacgatacgacacccgcatcgatttccaccatcgtgattgactcaacgtttttatgtcgggttacttcacgcagcatggcaccgtcgccgccgccgataatcagcacatgtttcgcgtgaccatgggccagtagcggaacatgggtcatcatctcatgatagataaactcgtcgcgctcggtggtttgtactacgccatccagcgccattacgcgaccaaatgcagcgttctcaaaaatgatcagatcctggtgatcggtcttttcatgatacagaacgttatctaccgcaaagtactgcccaaactggtcgtgtagcgtttcatgccactgttttttttcggccatgggttgatacctcctttgttaacacccgtaaaaaaagggcgcaacataatagctaacattgaccgcggatgcacggtcaatatttctacaaaaaggtatcagggattatttgacgtaggcaagcaggcttaaggaatcgcgggccagggctttgcactttttagcgacgggaatgccaatgccgctgagatcgcggtagctgtcttcaccgagggctttcatgtcgaaggtgtcgtaattactgagatcccactggttttgctgggcgaaaaagaccagtgcgcgacgaatttgcccgttaggtaagttctggtaaccacaatcgttcttcagaaagacaaaaactgccgttaaatcggccatatcttcggcttcagactcgctgagcgcgtaactgtttgcgcaaacggccatcaggctgccgaataacactgttctgaaaaacgtcttcattgcttctaccaggggcttaaagaagataaacgttagcacactgcgagcgaggcgacgaccattattgtcgattaaattgtgtctgcggcttgaccttcccgtaaggggaaggactatgctcaacgtttgattttgtttcgcctgcttaagaataaggaaataactatgcaacgtcgtgatttcttaaaatattccgtcgcgctgggtgtggcttcagccttgccgctgtggagccgcgcagtctttgcggcggaacgcccaacgttaccgatccctgatttgctcacgaccgatgcccgtaatcgcattcagttaactattggcgcaggtcagtctacctttggcgagaaaactgcaactacctggggctataacggcaatctgctggggccggcggtgaaattacagcgcggcaaagcggtaacggttgatatctataaccaactgacggaagagacgacgttgcactggcacgggctggaagtaccgggtgaagtcgacggcggcccgcagggaattattctgccaggtggcaagcgctcggtgacgttgaacgttgatcaacctgccgctacttgctggttccatccacatcaacatggcaagaccgggcgacaggtggcgatggggttggctgggctggtggtaattgaagatgacgagatcctgaaattaatgctgccaaaacagtggggtatcgatgatgttccggtgattgttcaggataaaaaatttaacgctgatgggcagattgattatcaactggatgtgatgaccgccgccgtgggctggtttggcgatacgctgctgaccaacggtgcaatctacccacaacacgctgccccgcgtggttggctgcgcctgcgtttgctcaatggctgtaatgcccgctcgctcaatttcgccaccagcgacaatcgcccgctgtatgtgattgccagcgacggtggtctgctacctgaaccggtgaaggtgagcgagctgccggtgctgatgggcgagcgttttgaagtgctggtggaggttaacgacaacaaaccctttgacctggtgacgctaccggtcagccagatggggatggcgattgcgccgtttgacaagccgcatccggtaatgcggattcagccgattgctattagtgcctccggtgctttgccagacacattaagtagcctgcctgcgttaccttcgctggaagggctgacggtacgcaagctgcaactttctatggacccgatgctcgatatgatgggtatgcagatgctaatggagaaatatggcgatcaggcgatggccggaatggatcacagccagatgatgggccatatggggcacggtaatatgaatcatatgaaccacggtgggaagttcgatttccaccatgccaataaaatcaacggtcaggcgtttgatatgaataagccgatgtttgcggcggcgaaagggcagtacgaacgttgggttatctctggcgtgggcgacatgatgctgcatccgttccatattcacggcacccagttccgtatcttgtcagaaaatggcaaaccgccagcggctcatcgcgcgggctggaaagataccgttaaggtagaaggcaatgtcagtgaagtgctggtgaagtttaatcacaacgcaccgaaagaacatgcttatatggcgcactgccatctgctggagcatgaagatacggggatgatgttagggtttacggtataaaaagaccgtattcggaaatatgcccggatctctccgggcattatggttatttcacatcatccggcagcgcataagccacaatatagtcgcccatcttcgtaccaaatgaaccgtgaccgcctgcggagatcaccacatactgcttgccattcacttcataggtcattggcgtcgcctgaccacccgctggtaaacggccctgccacagtttttcaccgttgctcatgttgtaagcgcgcaggtagttatctgccgtagcagcgataaacagcacgttacccgccgtggagattggcccgcccagcatcggcatacccatattgaacggcaccggtacaggcatcgggaacggcatactgtcttgcggcgtaccaatacgtttcttccacaccacttcattggttttcagatccagcgccgagatataaccccatgctggctgtttacacggcagaccaaacggtgagaggaacgggttgagcgtgacaccatacggtacaccgtactgtggctgaatgccggattccgtacccgtgcctttggcatctttcggctgctccatcgggttacccggaccgcgtgggatcagttcgaaacaaacggcagtgccattgggttggcaattgccacttcacgatttggatcaacggaaatcccgccccattcgaacatccccaggttacccgggaagaccagcgtaccctgttcagatggcggggtgaaaatgccttcatagcgcatctggtggaacatcacgcggcacaccagttggtcaaacatggtggctccccacatatccgcaccgctcaaatctttcgtcggacggaagctcagttccgagaatggttgagtaggggtaacgtaatcgcctttggcagcaccttggggaaccggtttttccggtgccggaaccaccagttcgccattacgacgatcgagcacaaaaatgttgccggttttcgccggagcgtaaataactggcactttctgaccattaacggtgatgtccgccagcgtcggctgtgccggaagatccatatcccacaggtcgtggtgaacggtctggtagctccacgccagtttcccggtagtggcattcagcgccagaatcgagctggcataacgttcctgttccggtgtgcggttaccgccccagatatccggcgtggtcacgcccatcggcagatagaccagatccagcttcgcgtcataggccgctggtgcccaggagtttggcgagttaaaggtaaaggtgtgttcgtcagacgggattgcgttcggatctttcgcgccgggatcaaaagcccacagcagctccccggtgttgacatcaaaaccacggatcacgccagacgtttcgcgggttgagaagttatcggtaactgacccggccatcacgatggttttatcggtgataatcggtggcgaagtcggttcatacagacccggtttggtgtctggcatattgctttgcagattgagtacgcctttattggcgaaggtttcgcacagtttgccgttttcagcgttaatcgcaatcagtcgaccatcattgaccggaagaatgatacgacgcgggcaatccgccatcacttccggcgaagccgtttctgctttggcttcatgataagagacgccacggcaggttacgtgctggaaagactcgttagttttcagctcaggatcgtaatgccatttctctttgccgctggcggcatcgagcgcaaacaggcgctggtgagcggtacacaggtaaagggtgtcgcccactttaatcggcgtcacttcattggtgatttcgcccggatcgttcggctgcttcacatcgccagtacggaacacccaggcttctttcagattatggacgttatcggcgttaatttgtttcagaggtgaaaagcgttgaccttcctgattgcgaccataggcaggccagtcctgatcggcaacgggtgagatagcttccgcaggtgtggcattggcgcttaaggtgccgttgatttcctgcggatcgttaaatccggcccaggtcaggataccaccgctaatcagcagtgccaccaccagtgcggcaactgcgccgctggcaggaatgaccaggcgacgccagacaaacggcaggatcagccagatgccgaagaagaccagaatgtcgctgcgcggagtcagcgcccagaagtcgaaaccaacttcccagacgccccaaatcatggtgccgagcagcagggctgcgtacagccaaagcgcggcacgtttactgcgccacagcatccaggcgacgccgagcatcacaagaccagcgatagggtagtaccaggagccgccaatcgcgaccagccagcctccgccaatgagtagatacagcccgcaaagcgctgcaaaaagggctgttagcgtgacgagtaatcgtcgcgagcctgtattgttaattgccataaagagacaccatttcaattcattaatattttagtagcaattaattataggttttaacatgtgtgatcgtcatcacaattcgagctttattaacagattccgcgaatgaatagttttactggtatactgcgtgtcttgcgctttgttgcggtgccaaaacctgcccgtgcgaagtgatttgtttttaaatcatatggttagagatatgaaacatactgtagaagtaatgatccccgaagcggagattaaagcgcgtatcgccgaactgggtcgtcagattactgagcgttacaaagacagcggcagcgatatggtgctggttggtctgctgcgtggctcatttatgtttatggcggacctgtgccgtgaagttcaggtatctcatgaagtcgactttatgaccgcctccagctacggtagcggcatgtccaccacccgtgatgtgaaaatcctcaaagatctggatgaagatatccgtggcaaggacgtgctgattgttgaagatatcatcgactcggggaatacactgtcgaaagtgcgtgagatcttaagcctgcgcgaaccgaagtcgctggcgatttgtacgctgctggataaaccgtcccgtcgtgaagtgaacgtcccggtagaatttatcggtttctcgatcccggatgagtttgtggtgggttacggcattgattacgcacagcgttaccgtcatctgccgtatatcggcaaagtgattctgctggacgagtaagtgtgaagttgccggatgtgttgcatccggcatggcatttttatttgtggttggcgtgtttcagcttgaggttggaaattccgtgacggtaacgttgctcaagggtttcgcggttggtcgctgtgacatccagatcacgcagcaagccgtcgtgaatgccgtaggcccagccgtgaatggtaactttctgcccgcgtttccacgctgattgcataatggtggagtggcccaggttatacacctgttccatgacgttcagttcacacaaggtatccagacggcgctcttgcggcatttcgccgagcaatgagctatgtttgaaccagatatcgcggatatgcagcagccagttgttgataagccccagttccgggttttcaactgcggcttgtacgccgccgcaaccgtagtggccacagataataatgtgttcaacttcgagtacatccactgcatactgaaccacggaaaggcagttcaggtcggtgtgaatgaccaggttagcaacattacggtgaacaaagagttcgcccggctcaagaccggttaaacgttctgcaggaacgcgactgtcggaacatccaatccatagaaagcgcggtttttgcgcttgtgccagtttctcaaaaaacccgggatcctcttccaccagcatttttgaccatagtgcattgttgctgatgagtgtatctatgtctttcatggaggttaacgacctgtaaccaaataattacgtttggctaatatagggcaactccgggacgatttaaaccacagataaagtgtaagaacgtaaggtaagtaaaaatttatgaccattgcactggaacttcaacagcttaaaaaaacctatccaggcggcgttcaggcgcttcgtggaatagatttgcaggtcgaagcgggtgatttttatgcgcttctcgggccgaacggggccgggaaatcgaccactatcggtattatcagctctctggtaaataaaacctccgggcgggtcagcgtatttggttacgatctcgagaaagatgtcgtgaacgctaaacgtcagttgggactggtgccgcaggaatttaacttcaacccgtttgaaaccgtgcagcaaattgtggtaaatcaggcagggtactacggtgtggagcgcaaagaggcgtacatccgcagcgaaaaatatcttaaacaactcgatctatggggaaaacgcaacgaacgtgcgcgtatgttatctggcgggatgaagcgccgtttaatgattgcccgtgcgttaatgcatgaacctaaactactgattctcgacgaaccgaccgcaggcgtggatattgaacttcgccgctcaatgtggggctttttgaaggatttaaacgacaaaggcaccaccatcattctcaccacacactacctggaagaagcagaaatgctgtgccgcaatatcggcattattcaacacggtgagctggtggaaaatacctcgatgaaggcgctgctggcgaagctgaaatcggaaacctttattctcgatctcgcaccgaaaagtccgttaccgaagctcgatggctatcagtatcgactggtcgataccgcgacgctggaagttgaagtgctgcgtgagcaggggatcaacagcgtatttacgcagttaagtgagcagggcattcaggtattaagtatgcgtaacaaagctaaccgtctggaagagctgtttgtttcactggttaatgaaaaacaaggagatcgcgcatgatgcatctttactgggtggcgctaaaaagcatctgggcgaaagagatccatcgctttatgcgtatctgggtgcagacgctggtgccgccagtcatcaccatgaccctttactttattatcttcggtaacctgattggttcgcgtattggcgatatgcatggcttcagctatatgcagttcatcgtaccggggctgatcatgatgtcggtgatcaccaatgcctacgccaacgttgcgtcatcattttttggtgccaagttccagcgtaatattgaagagctgctggtagcgccggttccgactcacgtcattattgccggatatgtcggcggtggcgtggcgcgtggtctgtttgttggcattctggtgacggcaatttcactgttttttgtgccgtttcaggtgcattcgtgggtattcgttgccttaaccctggtgctcacggcggtgttgttctcccttgcgggtttgctgaacggtgtgtttgccaaaacgttcgatgacatcagcctggtgccaacctttgtgttaacgccactcacgtatttgggtggggtcttttactcactgactttgttgccgccgttctggcaagggctgtcgcacctgaacccaatcgtttatatgatcagtggtttccgctacggcttcctcggtatcaatgatgttccgctggtcactacttttggcgtactggtggtctttattgtggcgttttatttgatctgttggtcgctgatccaacgtggacgtggtttgcgtagctaaggctatttcctctcctctggatttgggggagaggagttttgacggctatcaccctttatcaacaatggtcagggtagactgattttcggctaaggaggaaggcgatgttaggttgggtaattacctgtcacgatgaccgggcgcaagagatactggatgcgctggagaaaaaacatggggcgcttcttcagtgccgggccgtgaatttctggcgtgggttaagctctaatatgctcagccgcatgatgtgcgatgctctgcatgaagcggactctggtgagggtgtcatcttcttaaccgatatagccggagcgccaccgtaccgcgtggcttcattattaagccacaaacactcccgttgcgaagtgatttctggtgtcacgttaccgttaattgaacagatgatggcttgccgtgaaaccatgaccagttcagagtttcgcgagcgtattgtcgaactgggtgggccggaggtgagtagtctttggcaccaacaacaaaaaaatccgcctttcgtcctcaaacataatttgtatgagtattaacccacgattcttatagcgcttttgctacaataaaagcgttgtttcaccctcggttattttttcatgtacaaacaagctgttattctcctgctgatgctgtttaccgcaagtgtcagtgccgcgttacctgcccgttatatgcaaaccatcgaaaatgctgcgatctgggcgcaaattggcgacaagatggtgaccgtggggaatattcgggccgggcaaatcattgccgtggagcccactgccgcaagttattacgcatttaattttggctttggtaaagggtttatcgataaagggcatctcgagccagttcaggggcgacaaaaagttgaagacggtttgggtgacctcaacaagccgctgagtaatcagaacttaattacctggaaagatacgccggtctataacgcgccgagtgcgggcagtgcgccatttggggtactggcggacaatttgcgctacccgattttgcataaactgaaagacaggttaaatcaaacctggtatcagatccgtattggcgatcgactcgcctatatcagcgcgctggatgcccaacccgataatggcctgccggtgctaacctatcaccatattctgcgcgatgaagaaaacacccgttttcgccatacttcgacgaccacctcggtacgcgctttcaataaccagatggcctggctgcgcgacaggggatacgcgacactgagcatggcgcagctggaaggttacgtgaagaataagatcaatctccctgcgcgagcggtggtgattacctttgatgatggcctcaagtcggtgagccgctatgcgtatcctgtattgaaacaatatggcatgaaggcgacggcgtttgttgttacctcgcgcatcaaacgtcacccgcagaagtggaacccaaaatcgctgcaatttatgagcgtttctgagcttaacgaaattcgcgatgtttttgattttcagtcacatacccattttttgcatcgggtggatggctatcgccgacccatattactgagccgtagtgagcacaatattctgtttgattttgcacgttcacgccgcgctctggcgcaatttaatccgcatgtctggtatctttcgtatccgtttggcggatttaatgacaaagccgtgaaggcagcaaacgatgccggatttcacctggcggtgacaaccatgaaaggcaaagtaaaaccgggggataatccgttgttactaaaacgactttatatcttaagaacggattcgctggagacgatgtcgcggctggtgagtaaccagccgcagggataacaatcaagcaacctgtaccggaatcgctttcgcggtacgtttcatttcattgtcgccttcaaaataggcgacattgggtcgccaggtgcgagcttcttcatctggcatggtaacgaagctggcgatgatgacaatatcgccgacgctggcgcagtgggccgccgcaccgttaacagaaataattctcgaaccgcgttctgccgcgatggcataagtggagaaacgcttgccgttggtgacattccagatatcaatggcttcgttttcgagaataccggctgcgtcaaggaaatcctggtcaatggcgcaagaaccttcatagtgcaggtccgcatgagtcactttcacgcggtggagtttgccctgcagcatcgtgcgaatcataacttctacctttctaccctgtcgttaacgaagcaggcgatgcctgctttgaggaaattctcacgcagtattgcccgatttttgtttagtgtctactcatctgacggcatttacatcagcagtttgcgtaccgtgccgaagcgtgccatgtaacggctgtaaccaattgaaatttctctgaacgctgctcggtaaacactaaagaggtggctgacgatggcacgccttgactggatactgccttcacgcaagacaacacggaaggcagggaagatggatgcaccgagtaccacaccgcatgatgcagtgtttaaacaatttttaatgcacgcggagacggctcgcgactttctggagatacatttgccagtggaattacgagaactttgtgacctcaacacgcttcatttagagtcggggagtttcattgaagagagcctgaaaggacacagcacggacgtgctctattccgtgcaaatgcagggcaatcccggttatctgcatgttgtgattgaacaccaaagcaagccggataagaaaatggcctttcgcatgatgcgttattctattgctgccatgcaccggcatctggaggcggatcacgataagctgccgctggtggtgccgatactgttttatcagggcgaggccacaccttatccgctctcaatgtgctggtttgatatattttactcgccggagctggcacgacgcgtctataacagtcctttcccgctggtggatatcaccatcacaccggatgacgaaatcatgcaacatcggcggattgcgattctcgaactactgcaaaaacatattcgccagcgcgacttaatgttattgctggagcaactggtcacgctgattgacgaagggtacactagcggaagtcagttagttgccatgcaaaactatatgctgcaacgcggtcatactgaacaagcggatttgttttatggtgtgctgagagacagggaaacgggaggggagtctatgatgacgctggcgcagtggtttgaagagaaagggattgagaaggggattcagcagggaagacaggaggaaaggcaagaattcgccctgcgtcttctaagtaaaggaatgtctcgggaagacgttgcagagatgacaaatttatctcttgctgagattgataaggtaattaaccttatttaagttacctgtgttatgacagatgacgtggggtaaattaataactggcgccatcagccgtagcgccagttaagtattacgccagctcgaccattttgttgtcgatcaggcgagcatcgccaagccaggcggctaccagaattactgcccgtttgctggtttcagaaacttccagcaatgtgtcggcatcgcgaatctgaatatcatcggcgcggaagcctttttcattcagttcttgccccgcaatggtaataatttcatcgagatcccgttccccagcctgcaatttgtcagcaatcgaacttaaaactttgtacagaccaggcgcaattttgcgttgttccgccgtcagataaccgttacgggaacttagcgcaaggccatctttggcgcgcataattggcacaccgacaatctcaatatcgaagcccatatcggcaaccattttgcggatcagcgccagttgctgaaagtccttttcaccgaagcaggcgatgtccggctggaccaggttaaacagcttgctgacgatagtcgaaacgccgcgaaaatgccccggacggctcgcgccttccagcatggtcgaaagcccgggaacgtcaacgtaagtatgggtttcagtaccgttcgggtagatctcttttaccgaaggggcgaaaactaaatccactttacgtttgtttagcttctcgcagtcctcctgcaaggtccgtggataacgtgccagatcttccgggcggtcgaactgcatcgggttaacgaaaatactgacgacgaccacatcggcgcgggctttggcttcgtcgaccagcttcatatggccatcgtgcagattacccatagtaggcaccagcgccacgcgcttgccttccatacgcaggcggcgaatttgctgacgcagcagcggcagggtttcgataattaacacaacgtgactccttaatggaaactgtgttcttcgcccggataaacgccggactccacttcagccatatactgccgcacagccgcgcggatgtcgcccgtttcggcgaggaaatttttagcgaatttaggaatgtgaccgccggtaatgccgaaggcgtcgtgcatcacgaggatctgcccgtcagtgacgttgcctgcgccaatgccaataaccgggatcgccagtgcttcggtaatacgttttgccagttcaaccggcacgcattccagcaccagcagctgtgccccagcggcttctaaggctaatgcatcgctgagcagttgatcgcccgcttcatcgccgcgcccctgaactttgtagccaccgaaaatattcactgactgtggggttaaacctaagtgaccacatacaggaacggcacgttcggtcagcatttttacggtttcgaccagccactcaccgccctcaattttgaccatattggcaccggcacgcataaccgttgcggcgttttcaaaggcttgttccggcgtggcatacgccataaacggcaggtcagccaacagcaggcagtttggcgcgccgcgacgtacggcggcggtatgataggcgatatcctcgacggtaacgggaagggtggagtcgtggccctgaaccgtcatgcccagcgaatcgcctaccagcatgacgttaagtccttcatcagcaaatagtttcgcgaagctgtagtcgtaagcggtgatggtcgcgaaacgctttttatcctgcttacatttctgaagtgaagcaatggtggtcggtttcataacgtgtcctgataaatgatgtcgtgttgcctggcattttatcagtcacattggtgggggcaatgatttatcaattaccgcaccgccagatgatggcggtgcggtggacttattaagggtaggttacctggaaagtactggtggctttaaactcaccagcttctattggtatagttccatcctgttgtagcgtggcctggaaatggagagggtatgttatacctgtatcttgatccgggtaaactcctcctgttgtatcgtctttgcctctcgggtcgtaatctttataaacagaatttgaatcattaggtttcaatgtcattagaggatttttactagttgctaaaccttctatgagtacaccgactccttttgctgcgtcattacctgtgagagtattaccaaggagttgcccgttttcagtaccaacctttgttgaaactaattttgtctcaatattagtcacacgaacgcagttttgaagtgaaatatcaaaaggaaccggtgtggcaccgtttctgatttgttctgcactatattcacccatttttaccgtagaaccagtcacagaagttccactaagcatagcggtaaaacaagtgggattagtcaacttgacattgagcagatcgaaatcgattttgataaaataactatgctcatttataccttggcctgcgccataggctttaaatgaatacagataatttgatgagctggataatttgatctgttgagttactgttggatcaaagtttgtatctgtatagaattcaattgtaagggtctgataaataccacctacagcccagtatttacgggtgctattcgcattattgcaactccaatataacacgtcttcgcttggattataccacgaaaaatattgttctgcagagtcaccaatgtatatcccaggtgaactaacgttagttacggtaccgtaagctgaccacatgtttgaaattaataatgtgtaatacaaaccaggaactgatgtattaaataatttatgggagccatacattttacctgagtcaaccattgcattttcaatacgcattgcgctaccacttgtgctatcacttctgttgcaataaagaaaaccaccaccagaagcggtatctaactgactccactgtaattttacacctgtaggtccaagctgcgtcggtttgtagaaaactaaattatttgtacttgttgcatatctgaatatgacagtagcatcgccattcggccccgtttctctccatttttgatctgacggaccaacgccgtaactattcccaacaatatatcctacgttatcatcagtgccagcactcgcggtataacaactcaagcacagaattaaaaaaagaaaatgtctgaagaatttcttcattatcactccaccatctactgctgtaacagtcgcagttatttgttttgatctattattcgtagtacacatcaactaatatatgactcattacctggccagatatgacatccagcgcgggatcgatttttgcattctggcataaaatttccatgaagaattatgcagggcagaagtcattactggatacacggaacgagaatttcctgctgaactaataacattgaatatattggtcgggtcctgaatggaaaagagaacgacaccgacatttttagccccggttgcgacttcattggcaaatatttgccttgaacctgcagccatgacaccgctaagggctctaaaatcaatatgtaactgattaagcacatcgccagttccctgtaatgcacagtctgatactgtgacagtgaactcttttccacctggttgatagctttcaggagtaacattatctgaaaaatatcccaccccaacgacgccaagatcaatattaccctggttactgattccgcttttgcaagtgctgttttttacattggcaacaaggtcaatatcctgcccagcgatggctggataggtaatgggaaactgtagtgacagaaacagaattattctcttcatcagcttacgttgagtgggatgcatatatagttcctggatctgtcagtctgttagttataggttactgtaaatgtggcaggtgcagaaaatttacccgcagtgacattgcttacggttttatttttttcgacgaccagtcgagcactcatcggataataaacaaccgcgttggctgcattggagatagtgacctcttgagatgctggtgtcacacaactaaattgtgttgcgctccctgttgccggagtttcggtgctccagacttcaacggcgacggcacttgctttatctgcggctgtggatccatttgcgaaccccgcaccgtcattagcagtaccttcgcatgtggctcgcttggttaattttatttgtgcttttttattggggatacccgcacagtctttgaatttgagtttgaatgttttaactttggtcttggcattgatttcagaaatatatacatcgccaaagtcaacaacagaaatgtcctgatcagagtcatttactaatgtagcagtacaagtacctatttctacggtagtaatcacggtcagcccaatgctgtctgttgccgcataagagggtacgctgaacaatgaggcagccaaaacgacactgctggataatccataacgtaaatttttaaatgtcatcttaattatccttcttattgatagatgaaattaaacgttgccagtgcacgaaaattccccggtacgccttgccctgcatctgtttcacgtagcgcaacggtcatttcaagacccttatcgggctgcatctcgtctgtgctccagcgtatcttttccgcactgttaggtttaaggaaagtggcatcatcagtagtccgttttttgaaacccataccgatattacttgtcgtcgaagatgaatcaccagactgcggtataataagcttaggtgagcttgatgatgcatttccggtcagagtggtatcaatccaactgatgccactgctgcacccactagcaaccagtttaaaatcagcctgagattctgtcgttttattcgcgatcttatccagacccatcttagggattctcaatgtgtagttattattgccatcattcgtgacgttattaccagtaagtgtgatgttacaggttgtcgctttgacagtggctgtaaactctacattaatatccgttgcaaatactgatggtgataataatattcccatcagtatcgctattttatgtggcgttatttttatcatttgacgtcccttgtagttactgaatctgacaccgaattccattcagaataatagattgcgctattttttctgcttctgaactttgttgataatgcgcaagacaacttacgggtttactttcttcgagccatttaatgctgatatttccctgctgctcaataccacgaacaaatgcttgtccaccctgtccaacattaccaatgacattgcctttctcatcataaatatctgcagcaaatggaatatttttaccatcacttcgtgtgatgttcataatggctgattgcccttgcacggtttcaaaatcagcaaagacgactgaaccctgacgcggtacagctactgcactggtactttttaattcaacatcgttctcaagatcgttgatatccagcgcgatacggttttcatgataaggagaaagagcgctggtgacaccataaccccatcgatcgatagtactgttgccataatttattcgcgctccttgagcacctggagcctgaactaccgccagtgtatcggagtcgctaaaactgtcattactgaaggtcaggccgccgctatgcaatacaaaaccaccgtcggtgctgagagacacttgacgactgttatcgctatttgcagaaactgaacctgccagggttccccacggtgattcatagctggcataacccccaacataactcaaatctttgctggctttattcatcgtatagccagtatttacgctataactgacgcgagcgttatcactatagccactgctactgacgttgagttggttattacccttaaagtcactgctcatttgagtatcaatactctggaaacctgaagtccgttgttcagtgccaagtaatttttcaataggaatggtgaaactgagataaacgctatcgtcagtgtcgccgtcttcattccatgaacgctgggcactgacactgtagctgccccaggatgcactgttactgtagccaatagagtaattgctacgattttgtccggaagcccagtaatcggaccaacttccggaaagataaaatgaaccgtaatcttttttctcaaattttagcggttggttaatactgaccgtaacctgatttttcatgcgcgagtaattacgcatggatttcggttcaagatcttgttcgggatgtttcacttcatcaattagagttagtgcatcattaagaccaaggtaattctgtgtcgaatagcgataggccgcgatattcagtgaagtacttgtttcttcgaataacttgttccaggaaacacgataactttgtccctgatatgttttatcatccggtatacgaacattggagtgagtcacatcgaaagaaaatgcaccggctgaagtattcagaccaagacctaacaaaccagcggtatagttattatcggtaatctgaataccagtataacccgttagatagttattcagaccgtagtagtagctggcctgaaataaattaggctcatcctgaatatcatcttttaagacctggccgccgctaatatcccaacgtccaacgccagggcgtaacatttgaacgaccgatgaaaaaggttgcgagaatgtccgctttgagccatcggattcttcgacagtaacaataagatcgctgccgtaacctgacggactcagatcatcaatgacgaacgcgcctggcggcacagtcgtttcataaatcttatagccaccttgcataatagtgactttggcgttggtattagcaacgccatgaatgataggcgcaaaactcgctaatgtcggaggcaacatgcggctgtcgctgtataaacgaatgccgcggatactgacagaatcaaaggtttcgcccgttgtataagactcaccaagaatgagttgagaacgcagcgaggcgatatcacgctgtatataccgattcttaaaatcataattactgccagaatcggtcatccagttgtagttgcctgaggcacgcagtcgccatgcacctaaattcatcccaccgttaaaagcagcataaatgctgtcatttcttcgaccaggagtttcactatgatatccgttgaggttgtatgacaacatggccgcattaatgccattttcccataacgatggatcaacatagttttggtaatttttcattacccatgcctgaggaacgtctatatccagacgttgctcgttaacgtcataacgaacagaagcctgagggataatttccgtcaaattaaggcaattgccgagtgtttcatccctggcaagcagaacggctttttcgttatttatatcgggagaatttatatgaaactgcaataaattcttaagtgtgatacaggcttgtgcgtttttttttccttcaatttcaataaatgtaatgctttggttaataataggttgatcgttgacataaacactgacgtcgtacatacccggtatagcagggttaccttcactataccggctgagatcaatatttgaggcattctgccccatcaggaaggtatggtcatattcaacaagttcagcacagaaagcactattgcaatacagcagcgcgcaaaacgtagcgatacgggtcagatgattatgataatttttagttggttttatagtcacgttatgcttcctgcggaattatatccttgcctgattacagactggcattaccttcaatggcgccaccaaaatcattaatggcgtaaaaatgtacttttgcagaacttgctttgccattaaggccagtgactttcatgacctcatcactaaatggtgcaatcattttcacatcaatcggatagcgtttaccgctagcttctaaatcaccactgctaaaagagacgtagtaaggggttggattggtcactcgcaatgacgccttaccttctgaacctgaccagaaccacttcagggctaacggggcttcagagggatttcccttcaatccatccgggcgatagaaaagttttatacgtgtgcgaaatgccagttgcagcagactttgattcgcgaccttttctgcatctggttttggtggaacttccagtacgttaaaccagaacacgctctctctgtctttaggcagtgaggtgctggctgtgtacattaatttgattgtttgcccacgtttggcatcaatacgcgatactggcggcgtggcagtaaaagggactgtaatactgccaggctcagcgttgtcatcgccagtatctaaccaactctggacaagcaacgggttattccctttattttccagacgtacgttgacacttttttgatcgcttttatatattacgcgagtacccgaaatgacaatgtccgcaatagacgatgaactaaaagccatacaggttacgaagcataaagctgttgtatgtttggtgttaaaaaacataaaccatccctgacagagttaattaaaacagggaataatataaaaatagaaattattaacactattccctgtatattcattcaatcaatttaattggtgaatacttactgataagtaatggtgtatgcagtgttagtttttacataaccagcagttgctgtttggtctgcgacggcacgaacgtaagacgctttaaaatcataaacagcagattttgtcgttgcatccagggctttagtatacacatcgccagggttgttaatttgaacctgtttgatagtggaaccatcaatattgtgcagagcgatattcacgccgtcagacgggttgttaatagacatgtcgttgttcagcgttcctttgctattaccaaagaaaacagaaccgaaggtcattttagctgtactacctggattcggatttgctttgctgcagtcaacggtgatgctgaaaggtttggctttagcgccaacggtgtcattcagcacgccagcatcgatttcaccaacagttgcagtttgcagcaggatcagaccatctttattaccgccgtcaacgcgggtttcacaggtgttatcaacaaccagaccactgatatttaactgaccaccatccatatcagcagaagcagtacctgcaaccattgccagcataagaccagacagggcaaaacctaattttttagacataaaaatccttgaataaaattccattagtcagactactggtttgaagaatgactattcatgacacaaatgttataagcagatgctagatattaatgagcaatgatatttgttaccaaaatttacaaccattgttcattaggacgcctattgtgcactttaagggcttttgaacaaattaaattttcttaattcaaaattaagcaaaaataaattcacaagtgcaattggttagggtatggcgatgggattgatatttatctgcgggaatttatattatgtttctgcaaaaatgtttaaactaaaatttttattaaggaaagagaggatgtatgattttcagaaaatatttatattcgtaatataaataaattaccatttgcttaatttgtcaaatgctcttgtatgtaagacttcacgcaacgtctccccatcaggaaacgccagctccggtgcaatctcaaacagcggccacagcataaatccacgattcttcatatcgtagtgcggaacggtcaggcgttcggtatttatcacttcattaccaaacagcatgatatcgagatccagcgtgcgtggtccccagcgttcagctttacgaacacgaccctgttgcagttctatgcgctgtgtatggttgagtaactcttccggggcgagcgaagtttcaagcgccacggcggcgttgaggtaatcgggttgatcttgcggccccagcggtggggtgcggtaaaacgaagaaacggcaagaatgtggctttcagggatatcgcctaatgctttcagggcagcattgacctgctccagcggagaggccagattgctgcctatggcaatatacgccactgtcatgcggtaccctcacgacgcggtgcgcgtttgcgtggacgacgagtacggcgacgcggtgacggctcttcatccaactcgttaagcatccctttttgatctggtggcgcggaaacctggaactcaccccaccatttcaccagacgctgcagttcagcgttacgttcaacttcagctcgcaaggccaacaggtcataagccgcacggaacttaggatgctccagcagtttccatgcgcgtttaccctgacgacgggacatacgcaactgcaactgccagatatcgcgggttaacgtcgtcagacgtttcgggattgccagtgaacggcaggcttcgtccagcacgtcgttcatcgccagcgcgaaagcgtcgtgataggtcaggccgctttcctgggcaatcttctgtgccgtctccagcagtgggtaccagaacatggcggcaaacaggaacgccgggttcacgcgcatatcgttatggatacgcgtatcggtattcttcagcacctgttcaatgatccgctccatcgggctgtcgccattttccgtgaagtagcgggtaatggtcgggaacagcggctggaacagatgatattcacacaacagcttataggtatcgtaaccgtagcccgcttgtagcagtttaagcgattcttcaaacaggcgtgccggtgggatatcgttcaacagggtagcgaggcgagggatcggttctgcggtttccgggctgatgcgcatacccaatttggcggcaaaacgtaccgcgcgcagcatacgtaccggatcttcacggtagcgcgtttccgggttaccaatcagacggataacgccgtccttcagatccttcataccgccaacgtaatcacggacggtaaaatccgctacgctgtaatagaggctgttgatagtgaaatcgcggcgctgggcgtcttcttcgatggagccgaaaatgttgtcgcgcagcaacatgccgttttgcccgcgttgggaggtcgtgcggtcgctgacgttaccttcgtggtgtccacggaaggtcgcaacttcgataatctccgggccaaacattacatgagccagacggaaacggcgacccaccaggcggcagttacggaacagtttgcgcacctgctcaggcgtggcgttagtggttacgtcaaaatctttcggctttttgccaagtaacaggtcgcgcacgccgccgccaaccagccaggcttcgtatcccgctttgttgagcctgtacattaccttcagggcattttcactgatatctttgcgggaaatagcatgctgctcacgcgggatcaccgtcacctgtggacgggcgactgcctgttcagcctcgctttcctcgcggcttagcaccttgcggcaaaaattagcgactcgggtaaaaatagtacacctcggtagtgtcaaacatcattcaggacaaaaaaatagcggctaatcatagctcagcatgacgcatttgagaatgttgaatttacaattgccgactcgggcacggcggtaagccgccagtttttgacggctgactgaaggatttgctcgacgctgaaatcctgccagtgtgcttctgcctgctgccccagaaattgaagtgccgcgattagtaccgggcgtggatcgcctttcggcaacgcaggcgcatgattctgcttggaaagtttagcgccttgtggattaagcgccagcggcagatgaatgtaatctggcactttccagccaaaaagctggtacagcgagatttgccttactgttggttcaatcagatcagccccacgcactatttctgtaacgccctggaaatgatcatcaaccacaacagccaggttgtaggcgaacaacccatcacggcgatgaatgataaaatcttcccgtgccagtttttcgtcggcgtgaataatgccgcgcagctggtcagtaaattgcgtgaccggatgctgctggcggatacgcactgcggcattgtctggtccatgatgcaacacccggcaatgaccgtcgtaaataccgccaatgctttgaatacgcgcacgcgtacaggtgcagtaataacttagtccttgttcatgtaaccaggcgagtgcttcacgataggcgtggtgacgttgcgattgccagagaacatcgccgtcccagtgcagaccgtaatgttccagctggcgcaggatagtttctgcggcaccgggaacttcacgaggcgggtcgatatcttctatgcgtaccagccagcgaccttgccgggcgcgagcctgcaaatagctgccgagcgcggcgatcagagagccaaaatgaagctcgccggaaggagagggggcgaagcggccaatatactgtgtgtctgtcatctctttgaacaaaaaataaggcgggagcatttcccgcctgtggtaaacgtgatggaacggctgtaattagccagccatctgtttttcgcgaatttcagccagcgttttgcagtcgatgcacagatcggctgtcgggcgcgcttccagacggcgaataccaatttcaacaccgcaggattcgcagtagccgaaatcttcgtcttccacttttttcagcgtcttctcgatctttttgatcagcttacgctcgcgatcgcggttacgcagttcgaggctgaactcttcttcctgggctgcacggtctaccgggtccgggaagttggctgcttcatcctgcatatgtgtaacggtgcgatcgacttcatccctgagttgattacgccatgcttccagaatacgacggaagtgcgccagctgggcttcattcatatactcttcgcccggcttctcctgatatggttccaccccagcgatggcgagaatactcagggacgatgttttacggttttgcccttcttgcatgttgcttctccttaacacgcactatcgatccccatgttcgggggaaaaatgaggccgctataaatagcagatgcttttccggatagcaattatctaaacgtaacacttgacaactgtgtgaggaaaagcgtatttgcgcacgcgaccagaatgtaaattaaccagttacttactttactacaatgtaaccggcagtgattttttaagagccatgccttcagcagaaatttccgctttgtaagccagaatttctaccccctctgttgagcttctgacaatagttgcgcgtatttctcatcgatgtggcgcgcgggtgaaaaccgtgtaatggctgaatgcagcacggcgaaaaagataaccgcacgctggccttcagccgctacgctcatcaactcccgaaggtgtttctgacctcgttcagtgaccgcatcgggaaaatatccctgttcgttctccgctaacgtaaccgatttcacttcaatatagcagtctggacgcgaatccgcctgcaacataaagtcaatacggctgcgttctgcgccgtattttacttcgcttttcagcgagctatagcctgacagttctgaaattgattcattaaggatagcctctttcgtcaacctgttagcccaaagcgtgttgacgcaaataaatgcgccgctctggctttgagttaattcccaggtgtgtgggtatttccgtttggtgttgtctgaagtcgaataccagacggtatcgccaggcgttgcacaaccggtcattgcacccgtattcgggcagtgtagcgttaattcgcgaccatcgggtgtgatcacatcggctaaaaaacgtttgtaacgctgaattagcgtcgcgcgctgtagagggggagagaattccattgcgacaatccttgttattgcgttagcgcccagcgttttagcggcgtgtagcgtgtgcgtccacgggcaaacgaggaggcgtaaagggtgaactccgtcaccgcataagaccagttaaaacctggcggcgggattgtcaccgcctcgctggcgtcgcgcaataaggtaatatgtggatgaaacggacgattgctttgaaaacaaccgctgcgggcagcctgtgaacggagcatattcgccagctggattaagccgcgtggcggctgacgcatccctaaccacaccacacgcgaacgcagccattgtccggcgtcatcaagcgtgagtgtgaaaccaggttgacgaatccgtccggctaaaagagaaagcgccttctctttctcggcgctcacttcgcctaaaaatgccagagtcagatgcaaattatcggcggcgaccggacgtcccgcctcaggtgggaagtgtgtggcgcgccaatggataatctgttcgcggatttctgcaggtaagtcgatagcaaagaacagacgttgcggttcagacatgtgaggcactcggttatgaattaccgcgatgctacaatgtggcgcgaagaatgttaaccctctggagcgttttgtgtcgtcgttgcccgttgctgccgtcttatctgaattacttaccgctctcgattgtgcgccgcaggtattattaagtgcgccgaccggggccgggaaatcaacctggctgccgctgcaactgctggcgcatcccggcattaacgggaaaattatcctgctggagccgcgtcgtctggcggcgcgtaacgtcgcgcaacggctggcggagctgcttaacgaaaagccaggcgataccgttggctaccggatgcgtgcgcaaaactgcgtcgggccgaatacccgcctggaagtggttaccgaaggcgtgctgacgcgcatgatccagcgtgacccggaactgagcggtgttggactggtgatccttgatgaatttcatgagcgcagcttgcaggcggatttggcgttggcgctgttactcgatgtgcaacaaggtctgcgtgatgaccttaaactgctgattatgtcggctaccctggacaacgaccgcttgcagcaaatgctgccagaagcgcctgtcgtcatctcagaagggcgctcgtttccggttgaacgccgttatttaccgctgcccgcgcatcagcgttttgacgatgccgttgcggtagccaccgctgaaatgctgcgtcaggaaagcggatcattactgttatttttacctggcgtcggagaaattcagcgtgtgcaggaactactggcttcgcgcatcggcagtgatgtattgctctgcccgctgtatggcgcgttgtcgctgaacgatcagcgaaaagcgatcctcccggcaccgcaagggatgcgcaaagtggtgctggcgaccaatattgctgaaaccagtttaaccattgaaggtattcgtctggtggtggattgtgcccaggagcgtgtggcgcgttttgatccgcgcacggggcttacgcgactgattactcaacgcgttagccaggcatccatgacgcagcgtgccgggcgcgccgggcgtctggagccgggtatctgcctgcatttaatcgccaaagaacaagcagaacgcgccgcggcgcaaagtgaaccggagatcttacaaagcgatctttccggtttgctgatggaattactgcaatggggatgcagcgatccggcgcagatgagctggctggatcaaccgccagtagtgaatctactggccgcgaaacgtctgttacaaatgctgggggcactggagggtgaacggcttagtgcgcaagggcaaaaaatggcagcgctgggtaacgatccgcgtttagcggcaatgctggttagcgcgaagaacgacgacgaagctgctaccgcggcaaaaattgccgccattctcgaagagccgccacggatgggcaatagtgacctgggcgtggcgttttcgcgcaatcaaccagcctggcagcaacgtagtcagcaactgttaaaacgcttaaacgtacgtggcggtgaggcagacagttcgcttatcgcgccgctacttgccggggcgtttgccgatcgcattgctcgtcgccgtgggcaagatggacgctatcaactggcaaacggcatgggagcgatgctcgatgccaacgacgcgctaagccgccacgaatggttgatcgcaccgttattattgcagggcagcgcctcgccggatgcgcggattttactggcgctgctggtcgatattgatgagttagtacaacgctgcccgcagctggtacagcagtctgacactgtggagtgggatgacgcgcaaggtacgctgaaagcctggcgtcggctacaaatcggtcagttgacggtgaaagtgcagccgctggcgaaaccgtcagaagacgagttgcatcaggcgatgcttaatggcatccgtgataaaggtttaagcgtgctcaactggacggcggaagcggaacagctacgcttgcgtttgttatgcgccgcaaagtggttgccggaatatgactggccagcggttgatgatgaaagtttattggcagcgctggaaacgtggctgctgccacatatgactggcgtacattcactacgcggcctgaaatcactcgacatttatcaggcactacgcggattacttgattggggaatgcagcaacgtctggatagtgaattgcctgcgcattacactgtgccgacgggaagccggatcgccattcgttatcatgaagataacccgcccgcgctggcggtgagaatgcaagagatgtttggcgaggccaccaatccgacgatcgcccaggggcgcgtgccgctggtgctggagttgctttcacctgcccaaaggccgctgcaaatcacgcgtgatttgggggccttctggaaaggggcgtatcgtgaggtgcaaaaagagatgaaagggcgttatcccaaacatgtctggccggacgacccggcaaatactgcaccgacgcgacggacgaaaaagtattcgtaaggttggttttctccctctccctgtgggagagggccggggtgagggcatcagcgcgcacgttcaccctcaccctaaccctctccctcaagggagaggggaccgatcgagcacaaattttgagagatatcttcttctgtcttgtaacagaagaacagaaaatcgggcttttgcgcctgaatattgcggagaaaaagcatggccgggaatgaccgcgagccaattggacgcaaagggaaaccgacgcgtccggtcaaacaaaaggtaagccgtcgtcgttacgaagatgacgatgattacgacgattatgatgactatgaggatgaagaaccgatgccgcgcaaaggtaagggcaaaggcaaagggcgtaagcctcgtggcaaacgcggctggctatggctactgctaaaactggctatcgtttttgccgtgctgatcgccatttacggcgtttatctcgatcaaaaaattcgtagccgtattgatggcaaggtctggcaactgcctgcggcagtttatggccgaatggtcaatcttgagccagacatgaccatcagcaagaacgagatggtgaagctgctggaggcgacccagtatcgtcaggtgtcgaaaatgacccgtcctggcgaatttaccgtgcaggccaacagcattgagatgattcgccgtccgtttgatttcccggacagtaaagaaggacaggtgcgcgcgcgtctgacctttgatggcgatcatctggcgacgatcgtcaatatggagaacaaccgtcagttcggtttcttccgtcttgatccgcgtctgatcaccatgatctcttcgccaaacggtgagcagcgtctgtttgtgccgcgcagtggtttcccggatttgctggtggatactttgctggcgacagaagaccgtcatttttacgagcatgatggaatcagtctctactcaatcggacgtgcggtgctggcaaacctgaccgccggacgcacggtacagggtgcgagtacgctgacgcaacagctggtgaaaaacctgttcctctccagcgagcgttcttactggcgtaaagcgaacgaagcttacatggcgctgatcatggacgcgcgttacagcaaagaccgtattcttgagctgtatatgaacgaggtgtatctcggtcagagcggcgacaacgaaatccgcggcttcccgctggcaagcttgtattactttggtcgcccggtagaagagctaagcctcgaccagcaggcgctgttagtcggtatggtgaaaggggcgtccatctacaacccgtggcgtaacccaaaactggcgctggagcgacgtaatctggtgctgcgtctgctgcaacagcaacagattattgatcaagaactctatgacatgttgagtgcacgtccgctgggtgttcagccacgcggtggggtgatctctccacagccagcctttatgcaactggtgcgtcaggagctgcaggcgaaattaggcgataaggtaaaagatctctccggcgtgaagatcttcactacctttgactcggtggcccaggacgcggcagaaaaagccgccgtggaaggcagtccggcactgaagaaacagcgtaagttgagcgatcttgaaactgcgattgtggtcgtcgaccgctttagtggtgaagttcgtgcgatggtcggtggttctgagccgcagtttgcgggctacaaccgtgcgatgcaggcgcgtcgttcgattggttcccttgcaaaaccagcgacttatctgactgccttaagccagccgaaaatctatcgtctgaatacgtggattgcggatgcgccaatcgcgctgcgtcagccgaatggccaggtctggtcaccgcagaatgatgaccgtcgttatagcgaaagcggcagagtgatgctggtggatgcgttgacccgttcgatgaacgtgccgacggtaaatctggggatggcgctggggctgcctgcggttacggagacctggatcaaactgggcgtaccgaaagatcagttgcatccggttccggcgatgctgctgggggcgttgaacttaacgccaatcgaagtggcgcaggcgttccagaccatcgccagcggcggtaaccgtgcaccgctttctgcactgcgttcggtaattgcggaagatggcaaggtgctgtatcagagcttcccgcaggcggaacgcgctgttccggcgcaggcggcgtatctgacactatggaccatgcagcaggtggtacaacgcggtacgggtcgtcagcttggggcgaaatacccgaacctgcatctggcagggaaaacagggactaccaacaataacgtagatacctggtttgcaggcattgacggcagcacggtgaccatcacctgggtaggccgtgataacaaccagccgaccaaactgtatggagccagcggggcaatgtcgatttatcagcgttatctggctaaccagacgccaacgccgctgaatcttgttccgccagaagatattgcagatatgggcgtggactacgacggcaactttgtttgcagcggtggcatgcgtgtcttgccggtctggaccagcgatccgcaatcgctgtgccagcagagcgagatgcagcagcagccgtcaggcaatccgtttgatcagtcttctcagccgcagcaacagccgcaacagcaacctgctcagcaagagcagaaagacagcgacggtgtagccggttggatcaaggatatgtttggtagtaattaacatctaagcgtgaaataccggatggcgagttgccatccggtaaaataacatcccatctaagatattaaccctttcttttcatctggttgtttattaacccttcaggaacgctcagattgcgtaccgcttgcgaacccgccagcgtttcgaatattatcttatctttataataatcattctcgtttacgttatcattcactttacatcagagatataccaatggcgcgttccaaaactgctcagccaaaacactcactgcgtaaaatcgcagttgtagtagccacagcggtaagcggcatgtctgtttatgcacaggcagcggttgaaccgaaagaagacactatcaccgttaccgctgcacctgcgccgcaagaaagcgcatgggggcctgctgcaactattgcggcgcgacagtctgctaccggcactaaaaccgatacgccgattcaaaaagtgccacagtctatttctgttgtgaccgccgaagagatggcgctgcatcagccgaagtcggtaaaagaagcgcttagctacacgccgggtgtctctgttggtacgcgtggcgcatccaacacctatgaccacctgatcattcgcggctttgcggcagaaggccaaagccagaataactatctgaatggcctgaagttgcagggcaacttctataacgatgcggtcattgacccgtatatgctggaacgcgctgaaattatgcgtggcccggtttccgtgctttacggtaaaagcagtcctggcggcctgttgaatatggtcagcaagcgtccgaccaccgaaccgctgaaagaagttcagtttaaagccggtactgacagcctgttccagactggttttgactttagcgattcgttggatgatgacggtgtttactcttatcgcctgaccggtcttgcgcgttctgccaatgcccagcagaaagggtcagaagagcagcgttatgctattgcaccggcgttcacctggcgtccggatgataaaaccaatttcaccttcctttcttacttccagaacgagccggaaaccggttattacggctggttgccgaaagagggaaccgttgagccgctgccgaacggtaagcgtctgccgacagactttaatgaaggggcgaagaacaacacctattctcgtaatgagaagatggtcggctacagcttcgatcacgaatttaacgacacctttactgtgcgtcagaacctgcgctttgctgaaaacaaaacctcgcaaaacagcgtttatggttacggcgtctgctccgatccggcgaatgcttacagcaaacagtgtgcggcattagcgccagcggataaaggccattatctggcacgtaaatacgtcgttgatgatgagaagctgcaaaacttctccgttgatacccagttgcagagcaagtttgccactggcgatatcgaccacaccctgctgaccggtgtcgactttatgcgtatgcgtaatgacatcaacgcctggtttggttacgacgactctgtgccactgctcaatctgtacaatccggtgaataccgatttcgacttcaatgccaaagatccggcaaactccggcccttaccgcattctgaataagcagaaacaaacgggcgtttatgttcaggatcaggcgcagtgggataaagtgctggtcaccctgggcggtcgttatgactgggcagatcaagaatctcttaaccgcgttgctgggacgaccgataaacgtgatgacaaacagtttacctggcgtggtggtgttaactacctgtttgataatggtgtaacaccttacttcagctatagcgaatcgtttgaaccttcttcgcaagttgggaaggatggtaatattttcgcaccgtctaaaggtaagcagtatgaagtcggcgtgaaatatgtaccggaagatcgtccgattgtagttactggtgccgtgtataatctcactaaaaccaacaacctgatggcggaccctgagggttccttcttctcggttgaaggtggcgagatccgcgcacgtggcgtagaaatcgaagcgaaagcggcgctgtcggcgagtgttaacgtagtcggttcttatacttacaccgatgcggaatacaccaccgatactacctataaaggcaatacgcctgcacaggtgccaaaacacatggcttcgctgtgggctgactataccttctttgacggtccgctttcaggtctgacgctgggcaccggtggtcgttatactggctccagctatggtgatccggctaactcctttaaagtgggaagttatacggtcgtggatgcgttagtgcgttatgatctggcgcgagtcggcatggcgggctccaacgtggcgctgcatgttaacaacctgttcgatcgtgaatacgtcgccagctgctttaacacttatggctgcttctggggcgcagaacgtcaggtcgttgcaaccgcaaccttccgtttctaatttctcttttggggcacggatttccgtgcccatttcacaagttggctgttatgcaggaatacacgaatcattccgataccacttttgcactgcgtaatatctcctttcgtgtgcccgggcgcacgcttttgcatccgctgtcgttaacctttcctgccgggaaagtgaccggtctgattggtcacaacggttctggtaaatccactctgctcaaaatgcttggccgtcatcagcctccgtcagaaggggagattcttcttgatgcccagccgctggaaagctggagcagcaaagcgtttgcccgcaaagtggcttatttgccgcagcagcttcctccggcagaagggatgaccgtgcgtgaactggtggcgattggtcgttacccgtggcatggcgcgctggggcgctttggtgcggcagatcgcgaaaaggtcgaggaagctatctcgctggttggcttaaaaccgctggcgcatcggctggtcgatagtctctctggcggcgaacgtcagcgggcgtggatcgccatgctggtggcgcaggatagccgttgtctgttgctcgacgaaccgacctcggcgctggatatcgcccaccaggttgatgtgctgtcgctggtgcaccgtttaagtcaggagcgtggcctgacggtcattgccgtgttgcacgatatcaatatggcggcacgctactgtgattatctggtcgccctgcgcggcggtgaaatgattgctcagggaacgcctgcggaaattatgcgcggcgaaaccctcgaaatgatttatggcatcccgatgggtattttgccgcatccggcgggtgctgcacctgtgagttttgtttattgatgagcggcttacctcttatttcgcgccgtcgactgttaacggcgatggcgctttctccgttgttatggcagatgaataccgcccacgcggcggctattgatcccaatcgtattgtggcgctggagtggttgccggtggaattactgctggcgctcggcatcgtgccttacggcgtggcggataccatcaactatcgcctgtgggtcagcgaaccaccattgccggactcagtgatcgacgtcggtttgcgcacagaacctaaccttgaactgctgaccgaaatgaaaccatcgtttatggtctggtcggcaggatatggcccttcaccagaaatgctggctcgtattgcgccggggcgtggatttaacttcagcgacggcaaacagccgctggcgatggcgcgtaagtcactgacggaaatggcagatttacttaacctgcaaagcgcagcagaaacgcatttagcgcactatgaagactttatccgcagcatgaaaccccgctttgtgaagcgtggtgaacgcccgttattgctgacgacgcttatcgatccgcgccatatgctggttttcggtccaaacagcttgtttcaggaaattcttgatgagtacggcatcccaaatgcctggcaaggggaaaccaacttctggggcagtaccgccgtcagcatcgatcgtctggcggcgtataaagatgttgatgtgctctgttttgatcacgacaacagcaaagacatggacgcgctaatggcaaccccgctgtggcaggccatgccgtttgtccgcgccggacgctttcagcgcgtacccgcagtctggttttatggtgcgacgctctcggcaatgcactttgtgcgcgttctggataacgccatcggaggtaaagcgtgagtaaacgaattgcgctttttccggcgttattgctggcgctgctggtgattgtcgctacggcgctgacctggatgaacttttcgcaggcgctgccgcgtagccagtgggcgcaggccgcctggtcgccggatattaacgtcatcgagcagatgatttttcactacagcttgttaccacgtctggcgatttctctactggtgggcgcgggcctggggctggtgggcgtgctgtttcagcaagtgctgcgtaacccgctggcggaaccgacgacgttgggcgttgctacaggcgcgcaactggggattaccgtcaccacgctctgggcgatcccaggtgctatggcgagccagtttgctgcgctggcaggggcttgcgttgttggcttaattgtctttggcgtcgcgtgggggaaacggctgtcgccggtaacgctgattctcgcggggctggtagtgagcctttattgtggggcaatcaatcagttactggttatcttccatcatgaccagttgcaaagcatgttcctgtggagcaccggaacgctgacgcaaaccgactggggcggcgttgagcgtttatggccgcagttgctgggcggcgtgatgctgacgttactgctacttcgtccgttaaccctgatggggcttgatgatggcgtggcgcgcaatctcgggctggccttgtcgctcgcgcgtctggcggcgctgtcgctggcgatagtcatcagtgcgctgctggtgaacgcagtggggattatcggctttatcgggttgttcgcgccactgctggcaaaaatgctgggggcgcggcgtttgttgccacggttgatgctggcgtcgctgattggtgcgttaattctgtggctttctgatcaaatcatcctctggctgactcgcgtgtggatggaagtttccaccggttcggtcactgcgttgatcggtgcgccgctgctactgtggctgctgccgcgtttacgcagcattagcgcgccggatatgaaggttaacgatcgtgtcgcgactgaacgccaacatgtgctggcgtttgccctcgcgggcggcgtgctgctgttgatggctgtggtggtggcgctgtcgtttggtcgtgatgcgcacggctggacgtgggcgagcggggcgctgctcgatgatttaatgccctggcgctggccgcgaattatggcggcgctgtttgcgggcgtcatgctggcggtagcgggctgtattattcagcggctgaccggcaacccgatggcaagcccggaagtgctggggattagctccggcgcggcgtttggtgtggtgttaatgctgtttctggtaccgggtaatgcctttggctggctgttacccgcaggcagtctcggggcggcggtgacgctgttgatcattatgatcgccgccggacgcggtggattttccccacaccgcatgttactggcggggatggcgttaagtaccgcgttcaccatgcttttgatgatgttgcaggcaagtggtgacccgcgaatggcgcaagtgctgacctggatttccggttcgacctacaacgcgaccgatgcgcaggtctggcgcaccggaattgtgatggtgattttgctggcgattaccccgctgtgccgccgctggctgaccattttaccgctgggtggtgataccgcccgagccgtaggaatggcgctgacgccgacgcgaattgcgctgctgctgttagcggcttgcctgacggcgaccgcgacgatgactattggaccgttgagttttgttggtttaatggcaccgcatattgcgcggatgatgggctttcgacggacgatgccacacatcgtaatttcggcgctggtggggggtttactgctggtgttcgctgactggtgtgggcggatggtgctgtttccattccagatcccggcggggctgctgtcaacctttatcggcgcgccatattttatctatttgttgagaaagcagagccgttaattgaatgcctcgcccggtgggcgaggcaaaatcatcacaacttcgcaaacacccgacgtgcagcatcgatggtgttattgatatcttccatgctgtgcgccacggacataaagcccgcttcaaacgctgacggtgccaggtaaacaccttcatccagcatcatatggaagaaacgcttaaagcgttccacgtcacaggccatcacatcctgatagcacgtcacggactcggcgtcggtaaagaaaataccgaacatgccgccaacgtggttaacgaccagcggaattccggcttcttctgccgcttccagcagaccttctgccagacgtgatgtcagctcatccaacgtttcgtgaacgcccggttgcgcgacttcattcagacaggcgaaacccgctgccatcgcaattgggttaccggaaagcgtacccgcctgatagaccggacccgtcggggccagcgcatccattacatcacgacgaccaccgaatgcgcctaccggcattccaccgccgatgattttgcccaggcaggtgagatccggttccacaccgtaataatcctgtgcgccagctagcgctacgcggaagccagtcattacttcatcgatgatcagcaatgcgccaaattcgtcgcacagcgcgcgcagacctggcaggaactctggcagcggtggaacgcagttcatattgcctgccaccggctcgacgataatacaggcaatctcttgcgggtattgctcaaacgcggcgcgtacagaagccagatcgttataagtacaggttaaggtatgtttggcgaaatctgccggaacacccggcgagtttggctggcctaacgtgagtgcgccagaaccggctttcaccagcaggcagtcagcgtgaccgtggtaacaaccttcaaatttaatgattttgtcgcgaccggtaaaaccacgggccaggcggatggcgctcatggtcgcttcagtgccggagttcaccatgcgcaccatatccatggtcgggaccagttcggtcaccagttgcgccattttcacttccatttcggttggtgcaccaaagcttaaaccacgctcggcggcttcaatcacggcattgcggatcgccggatggttatggcccagcaccatcggcccccaggaaccgacataatcgatatagctttgccatcaacatcgtacagataggcgccgtccgctttttcgataaacagtggagtgccgcccacgccagtaaaggcgcgaacaggggagttcacaccgccagggatcagctcgcgcgctgcgctgtaaagattttcagacttactcatggagggttcctgattcgtagaaaaagtgaatggctgctattctatgttattcataacaagttaaatactcgtcaaacatcaggctgcttgtactggtgcaatcctgatttcttagagtataaaagttttgtgcatttgaaacattacgctttgcaaaggattttcatggaacgtgcgagtaaaatgccgtcatcttatttgtatgaccaataagtgatcattggatgaaaactgatactccctctttagaaacaccgcaggccgcgcgcctgcgacgcagacaactgattcgccaacttcttgagcgcgataaaaccccgttagccattttgtttatggcggcagtcgtcggcacgcttgtcgggctggcagcggttgcttttgacaaaggtgtcgcctggttgcagaaccaacgtatgggggcgctggtacatactgctgataattatccgctactgttaaccgtcgcttttctctgttcggcggtgctggcgatgttcggctactttttggtgcgcaaatacgcgcccgaagcagggggatcggggatcccggaaattgaaggggcgctggaagatcaacgtcctgttcgctggtggcgtgtattgccggtgaaattctttggcgggctggggacactcggcggaggcatggtgctagggcgcgaaggaccaaccgtgcagatcggcggcaatatcggtcgcatggtgcttgatattttccgcctgaaaggtgatgaagctcgccatacgctgctggcaaccggtgctgctgcggggctggctgcggcctttaacgcgccgctggcgggtattttgtttattatcgaagagatgcgtccgcagtttcgctatacgttaatttcgattaaagcggtatttattggcgtcattatgtcgaccattatgtaccggatttttaatcatgaagttgcgttgattgacgtcggtaaactttctgatgcgccgcttaatacgctgtggctttatctgatcctcggtattatttttggcattttcggccctatttttaataaatgggtgctggggatgcaggatttgctgcaccgtgtgcacggcggcaatattaccaaatgggtactgatgggtggtgcgattggcggtctgtgtggattgctggggtttgtggcaccagcaacgtcgggcggcggttttaacctgattcctatcgctaccgcggggaatttcagcatgggaatgctggtgtttatcttcgtcgctcgggtcattaccaccttactctgcttctcttccggcgcgccgggcggtatttttgccccgatgctggcgctgggtactgtgctgggaaccgctttcggaatggttgccgttgagctgtttccgcaatatcacctggaggcggggacgtttgctattgccggaatgggggcattactggcggcatctattcgcgcgccgttaacggggatcattctggttctggagatgaccgataactaccagctcattttgccaatgattattaccggtcttggcgcaacactattagcgcaatttaccggcgggaaaccgctatactcggcgattcttgcgcgcacgctggcaaaacaggaagctgagcaactggcgcgaagcaaggccgcatcagccagcgagaatacttgaacgaaataccagggtattagataatggcgattattattgggttagaatttgcccaattgccgatgtcgtttggagcaaaatatgagtgatgacgtagcactgccgctggagtttaccgacgcagcagccaacaaagttaaaagcctgatcgctgacgaagataacccgaatctgaaattacgcgtgtatatcaccggtggcggttgcagcggcttccagtatggtttcacctttgatgatcaggtgaacgaaggcgatatgaccatcgaaaaacagggcgttggcctggtggttgatccgatgagcctgcaatatctggtcggcggttccgttgactacaccgaaggactggaaggttctcgtttcatcgtgaccaacccgaacgcgaaaagcacctgcggttgcggttcttcctttagcatctaatctgttgttcatgtgccggataaactatccggcacatcttctctcttcaacgcccattctcatccagcgcaaacgtcggtagcttaagatgccaacgaatagccgccagccgaatcaatagcgtcacgaccatgcccatcatactggctgtttccagtggtacggaaaatgtgtaataagccgtagcgtggacaataccgccgataatacaggcagttgcgtagatttctgtacgtaaaatcatggggatctcgcgggccagtacatcacgaatgatcccgccgccaacgccagtaatgacgcccatgcaaaccgcgattaacggaccggcttccgcattaaaggctttattcacgccaatgccgacaaacaccgccagaccaacggcgtccagcaccggcaacatccattttggtaagcgtcttggctggcgcaccagcacgatggtcagcatgctggtgaccattgcaacgaccagatcggtgggatctttcacccaaaataccgggccgtgatccagcgccatgtcgcgaattgtcccgccgcctactgcggttaccacgcccagtaccagaacaccaaaagggtccatacgcaattttccggctaacaaaacgccggagatggcaaataccgctgtgccgactatatccagccaatagacgagcattgttcaatccccactgagcacctgaaaaggtcaggcgctaatctacctgtgaaagcgcattacagagctgttgtgcagcgaggataatacgtgggcttgcacgttcaaaccagtcactcgtgagaggaataacgggaattttgagctgttcaccccagtattgtttgattttaggaatttggtccggtccgcctgtaatgacaatcgcctgtggcgagcgtgctaacacctgttcgcggctaacttgcggccagggaacccggctgtctttaaagatgttttctccgccacaaacttcgagtacctggttctgaatcgactcttttccactggtaaatggcggattaatgccgaattgcagaaaaacacgttttttaggtttatcagcatattgcgctttcaattgcgcgtactgatccagcagggattgcgcggcttgttcggccttgtctggttgcggactccagggggccagttgacgtaacgcattggcaatttgttcaatgcttgtcgcatcgacccacatcacttttattcccagcgaagccagctggtcaacctgccgctcggcattacctccacgccaggcaatcaccagatcgggcttcagcgcgacaatgcgttccagattcatcccctgccaggtggaaacctgctcaatcttttgcgcttgtggaggatagtcggaatagctgctgaccccaaccggcgtgatcccggcagcaaaggcaagttcagtgttggcgggagaaagcgtgatgacgcgcggcgcggcgttgagccacagtggcgcaagaaaagacagggcgaccagcgccctgaacagtgacttagccatgtgcaagtttctgcaccagtgactcaaccatcaggctggactgtttagcggcaacagccaggaactcatcgaagctaagatgagactgttgatcggccacgtcggagatggcgcgtacgacaacaaacgggacgttgaaattgtggcagacatgggcgattgccgtcgcttccatctctacagcaatggcctgtgggaagttgtggcggattttcgccagaccaacagaaccgttgatgaaagcgtcgccgctaacaatcaggccacgtacagcgttaagattcagttcggcaatgcaggcctcagcggcagcgatcagtttatcgtcagctttaaagcctgccggacagcctggtaactgaccgtattcataaccaaatgccgtgacatccgcgtcgtgataacgtgcttcgtccgagacaacgatatcgcccactttcaacgttggtgccaggccaccggcagaaccggtgttaataatcacatctggcttgcagtgttccaacagcagagtggcacccagcgccgcagcgactttaccgatgcccgatttcagaagcgcaacctcggttccattcagttggccggtatagatttcgcaaccgccgagactgatagtttgacggttttcgattttgtcacgcagcagcgtaacttcttcttccattgcaccaatgatgccgattttcatagatttactcgcgataagcccgatttgaaggcatagtttaccatgcgcttacggggaagcgtatttctcacgcgggagaggacatggcacagattgatttccgaaaaaaaataaactggcatcgtcgttaccgttcaccgcagggcgttaaaaccgaacatgagatcctgcggatcttcgagagcgatcgcgggcgtatcatcaactctccggcaattcgtcgtctgcaacaaaagacccaggtttttccactggagcgcaatgccgccgtgcgcacgcgtcttacccactcgatggaagtccagcaggtggggcgctacatcgccaaagaaattttaagccgtctgaaagagcttaaattgctggaagcatacggcctggatgaactgaccggaccttttgaaagcattgttgagatgtcatgcctgatgcacgatatcggcaatccgccgtttggtcattttggcgaagcggcgataaatgactggtttcgccagcgtttatacccggaagatgccgaaagccagcctctgactgacgatcgctgcagcgtggcggcactacgtttacgggacggggaagaaccgcttaacgagctgcggcgcaagattcgtcaggacttatgtcattttgaggggaatgcacaaggcattcgtctggtgcatacattgatgaggatgaatctcacctgggcacaggttggcggtattttaaaatatacccgtccggcgtggtggcgtggcgaaacgcctgagacacatcactatttaatgaaaaagccgggttattatctttctgaagaagcctatattgcccggttgcgtaaagaacttaatttggcgctttacagtcgttttccattaacgtggattatggaagctgccgacgacatctcctattgtgtggcagaccttgaagatgcggtagagaaaagaatatttaccgttgagcagctttatcatcatttgcacgaggcgtggggtcagcatgagaaaggttcgctcttttcgctagtggttgaaaatgcctgggaaaaatcacgctcaaatagtttaagccgcagtacggaagatcagttttttatgtatttacgggtaaacaccctaaataaactggtaccatacgcggcacaacgatttattgataatctgcctgcgattttcgccggaacgtttaatcatgcattattggaagatgccagcgaatgcagcgatcttcttaagctatataaaaatgtcgctgtaaaacatgtgtttagccatccggatgtcgagcagcttgaattgcagggctatcgggtcattagcggattattagagatttatcgtcctttattaagcctgtcgttatcagactttactgaactggtagaaaaagaacgggtgaaacgtttccctattgaatcgcgcttattccacaaactctcgacgcgccatcggctggcctatgtcgaggctgtcagtaaattaccgtcagattctcctgagtttccgctatgggaatattattaccgttgccgcctgttgcaggattatatcagcggtatgaccgacctctatgcgtgggatgaataccgacgtctgatggccgtagaacaataaccaggcttttgtaaagacgaacaataaatttttaccttttgcagaaactttagttcggaacttcgcgctataaaacgaatctgaagaacacagcaattttgcgttatctgttaatcgagactgaaatacatgaaaaaaaccacattagcactgagtgcactggctctgagtttaggtttggcgttatctccgctctctgcaacggcggctgagacttcttcagcaacgacagcccagcagatgccaagccttgcaccgatgctcgaaaaggtgatgccttcagtggtcagcattaacgtagaaggtagcacaaccgttaatacaccgcgtatgccgcgtaatttccagcagttcttcggtgatgattctccgttctgccaggaaggttctccgttccagagctctccgttctgccaggggggccagggcggtaatggcggcggccagcaacaaaaattcatggcgctgggttccggcgtcatcattgatgccgataaaggctatgtcgtcaccaacaaccatgttgttgataacgcgacggtgattaaagtccagctgagcgatggtcgtaagttcgacgcgaagatggttggcaaagatccgcgctctgatatcgcgctgatccaaatccagaacccgaaaaacctgaccgcaattaagatggcggattctgatgcactgcgcgtgggtgattacaccgtagcgattggtaacccgtttggtctgggagagacggtaacttccgggattgtctctgcgctggggcgtagcggcctgaatgccgaaaactacgaaaacttcatccagaccgatgcagcgatcaaccgtggtaactccggtggtgcgctggttaacctgaacggcgaactgatcggtatcaacaccgcgatcctcgcaccggacggcggcaacatcggtatcggttttgctatcccgagcaacatggtgaaaaacctgacctcgcagatggtggaatacggccaggtgaaacgcggtgagctgggtattatggggactgagctgaattccgaactggcgaaagcgatgaaagttgacgcccagcgcggtgctttcgtaagccaggttctgcctaattcctccgctgcaaaagcgggcattaaagcgggtgatgtgatcacctcactgaacggtaagccaatcagcagctttgccgcactgcgtgctcaggtgggtactatgccggtgggcagcaaactgaccctgggcttgctgcgcgacggtaagcaggtcaacgtgaatctggaactgcagcagagcagccagaatcaggttgattccagctccatcttcaacggcattgaaggtgctgagatgagcaacaaaggcaaagatcagggcgtggtagtgaacaacgtgaaaacgggcactccggctgcgcagatcggcctgaagaaaggtgatgtgattattggcgcgaaccagcaggcagtgaaaaacatcgctgaactgcgtaaagttctcgacagcaaaccgtctgtgctggcactgaacattcagcgcggcgacagctccatctacctgttaatgcagtaatctccctcaaccccttcctgaaaacgggaaggggttctccttacaatctgtgaacttcaccacaactccatacatcttcatcatcctttaggcatttgcacaatgccgtacgttacgtacttccttatgctaagccgtgcataacggaggacttatggctggctggcatcttgataccaaaatggcgcaggatatcgtggcacgtaccatgcgcatcatcgataccaatatcaacgtaatggatgcccgtgggcgaattatcggcagcggcgatcgtgagcgtattggtgaattgcacgaaggtgcattgctggtactttcacagggacgagtcgtcgatatcgatgacgcggtggcacgtcatctgcacggtgtgcggcaggggattaatctaccgttacggctggaaggtgaaattgtcggcgtaattggcctgacaggtgaaccagagaatctgcgtaaatatggcgaactggtctgcatgacggctgaaatgatgctggaacagtcgcggttgatgcacctgttggcgcaggatagccgtttgcgggaagaactggtgatgaacctgattcaggctgaggagaatactcccgcacttactgaatgggcgcaacggctggggatcgatctcaatcaaccgcgagtagtggctattgttgaggtcgacagcggtcagcttggcgtggacagcgcaatggcggagttacaacaactgcaaaatgcgctgactacgcccgagcgtaataatctggtggcgattgtctcgctgaccgaaatggtggtgttgaaaccggcgttgaactcttttgggcgctgggatgcagaagatcatcgtaagcgagttgaacaactgattacccgcatgaaagagtatggccagctgcgttttcgcgtttcgctgggcaactattttaccggtcctggcagtattgcccgatcctatcgtacggcgaaaacgacgatggtggtgggtaaacagcggatgccagaaagtcgctgctatttttatcaggatctgatgttacctgtgttactcgacagtttgcgtggcgactggcaggccaatgaactggcgcgaccgctggcgcggctgaaagcgatggacaataatggcttgctgcgacgaacgctggcggcgtggtttcgccacaatgtgcaaccgctggctacgtcaaaggcgctgtttattcatcgtaatactctggagtatcggcttaatcgtatatcggaactgaccgggcttgatttgggtaattttgatgacaggttgctgctgtatgtggcgttgcagctggatgaagagcggtaggttatgcgttaaggtcgaggcggcgctggctcattcccctcagcccgaagggtagaggggaatgtccgagttaaccgtcagttcggcattatttacgcgttagtttttccagatcggcttcaatctcgctgatcttattggttacgactgactccaggtgacgtaagtcgtcgaggatcttacgcttaagatcaacttcgctgcggtcacgctggcagatttgatcaagctcatcaatgatataccgtagattcgggctgatttcctggacttctttataaccctgacccacaccatcagcgacgaccgttttacgctgacgcggatatttaaacttaacgctcttggcgaaaaactcgcctttgtctttctggaaatagattttcagaatatcgttgttggcttcctgccggaggctgtaacgatcaatttcttcaggattggtaatacccagacttttcagattgtcgtacatagcgttacctcaaaatgagtcagtaaattgtgcttattttagcatttggcctggcccgcccggctcgactgtgatcgcagaaagcctttttcttccagacttctatcatggcgtaaaaatcaaaaaattacctgctttattgtggcgatattccatgggatggattaacacatttatcttcgttttgcgaattacatgacagtccgaaacaagatgaaaaagtatttaaaaaaggggggaagaagaatgagtaggacgaattattctgagccagaaagcatacgggcagcatcatgctgcccgtatatgtactcttaatcgatggtacgcagcagttcgttaatgccgactttgccgcgagttttcgcgtcaactttcttaacgataaccgcacagtagaggctgtatttgccatctttcgacggcagattacctgaaacaaccacagaccccgccggaacgcgaccgtagtggatttcgccggtttcacggtcgtaaatacgggtgctctgaccaatgtatacgcccatagagatgacggaaccttcttcgacaatcaccccttcaaccacttcggagcgtgcgccaatgaagcagttatcttcaataatggtcgggttagcctgcagcggctccagcacgccgccgatgcccacgccaccggaaaggtggacgtttttaccaatctgcgcacaagaaccgacggtcgcccaggtatcaaccatcgtgccttcatcaacatatgcgccgatgttgacgtaagacggcatcagcacggtgttacgggcaataaatgcaccctgacgtaccgccgctggtggcacaacgcggaagccttctttctgaaaacgcgcttcgtcgtagtcggcgaatttcatcggcactttatcgaagtagcggctttctgccccttcgatcacctgattatcattaatacggaaagagagcagcaccgcttttttcaaccactgatgcgtcacccactgaccgtcaattttttccgctacacgcagtgcgccggaatccagcagggcgatcacctgatttaccgcttcgcgggttacggtgtctgcattggctggcgtgatctcggcacggcgttcaaaagcggtttcaataatgttctgtaactgctgcattgttaaactcttttcatatcagtaaacacatcaccctttatcgtttggattgagggcctctgtcaaccgctgatgcacttcctgctgcaactcgttattaagtgcacgccggtcagcggtggcaattatgaataaatcttctactcgctcgccaatggttgtaattcgggcaccatgaagcgaaattcccagatcggcaaaaattttcccgactctcgccagcagtcctggctggtcgagcgcgataagctcaaggaacgatttgcggtcggtatgggtcggcaaaaacgttacttcggtttcaacagtaaaatggcgtaatttggcgggttggcgacggggctgcggtggctgccagctactttgcgtcagtacttgctccagaccaaaccgaataacctcatgacgatctgcggacagcgggctgccatcgggttccagcacgataaaggtatccatcgccataccgtcgcgagtggtgaaaatttgtgcgtcgtgaacacttaaattgcggcggtctaattcggcacagacggcggcaaacagataggggcggtccgggctccagataaaaatctcggtgcctccacgcgtagcctgcgggctaagcaataccagcggtttgcttaaatcatgctgtaataaatggcgggcatgccaggccagttgatttgggctatggcggacaaaatagttagcacgacagcgtgaccaaatttggtgcagcgcctcttcgtcgatgttatccatgcgcagtagtgccagtgcctggagttggtgatggcgaacccgttcgcgcatatccggcgtgttttgcattccgcgtcgtagctgcttttcggtggcaaaatagagttcgcgcaacagactttgcttccagctattccacagcgtttcgttggtggcgcaaatgtcagccactgtcaggcataccagatagcgcagacgattttccgtttgaacttcttcggcaaactgcttgatgacttcagggtcctgaatatcgcggcgttgtgctgtcaccgacatcagcaagtgctggcgaaccagccaggcaaccagctgtgtttcgcgtgagttcagcccgtggagttctgcaaaatgcactacatcctgagcaccgagaatggagtggtcgccgccgcgtcctttggcgatatcgtgaaacagcgcggcgatgaaaatcagctcagttgacggcaggcgcggccagacgtccacacacaacggatggcgctggcgcgtttcttcactggcaaaactctccagtttcagcatcacgcggatagtatgttcatccaccgtgtaggcgtggaacagatcaaactgcatctgcccgacgatatgcgaccattgcggcatatacgcgccgagcacgctatggcgatgcattggcaatagcccgcgccgcaccgctccggggtgacgcagaatgctcaaaaacagttttcgtgcttccggaatattacacagcggttgttgcagatggcgacgggcatggcgtaactggcgcagcgtggtggagtaaatgccggtgatcgcactgttgcgcaccatggtgtagaacatacgcaagatggcttccggctggcgcataaatagtgtttcatcacgcaggtcgattagcgtaccgcgtagctgaaactcatcgtcgattggacgtggtttttcgtcggcgggaagggcgaggatggcttcatcgaacagttgcagcagcatctggttgagttcactgacgcggcgtgtaacgcggaagtaatccttcatcatccgctcgaccggttcgttgccttcaccactgtaattcagacgctgagcgacgctaagttggcgatcgaataacagacgattatcgtaacggctgacgaccagatgcagggcaaagcgaatacgccacagtatatgcagacattcgtttaattccgcccgctccgctgaggttaagaagccaaacccgaccatttcatccagcgatgttgcgccaaaatgacggcgggccacccattgcagagtgtgaatatcgcgcaagccgccagggctacttttgatgtctggttcaaggttgtagctggtgccatggtaacgctgatggcgctggttctgttcttcaactttcgccgcgtagaacttgtcggaaggccagaatccttcgctaaaaatatgtttttgcagttcgaggaagagcgcaacatcgccaattaataagcgggattcgattaaattggtggcgacggttaaatccgataacccttccagcatgcactcttcaagcgtgcgcacactatgaccgacttccagctttacatcccagagcagcgttaacagctcgcccactttttgcgcctgatcgtccgggagctttttacggcttaaaatcagtaaatcgatgtcagaaagtggatgcagctcgccacgaccgtagccaccgacggcgaccaatgccaggtcggcaatctggctgaatcccgcttcaatccataatcgttgcaggagctggtcgataaactcggtgcgcgcctcaatcaactgttctgcagagatcccattgtcaaaggcatcacccagccaacgctggaaagtatcgatatgggcttttatcccaccgacggttaattcatcacggggccagacgcatggattttgcggttgaccgggcagggtggggagagcggtgtttgcgtactgttctggaagggtattcattgtgcgccacccataagattaaattatcgcattaaaaaagccggcattcgccggcttcatcttattcgtcgtgcgagattatcgccgggatggtgtcatccttgcgtagcgtcaaaatttcgcagccgttatcagtcaccacaatagtatgctcatattgtgcagacaagctgcgatctttggtttttaccgtccagccatctttcatggtgcggatctcttttttacccgcgttgaccattggctcaatggtgaacgtcatccccggtttcagcacgacgttggtttcacgggagtcatagtgcagcacctgcggttcttcatggaagccgcgaccaataccgtgtccacaatattcacgaacgacggagaagccttctgcttcgacaaacttctgaatcgccgcaccgatttcgcgcaggttaatgcctggtttgaccatgcgcagcgccaggtacaggctttcttgcgtgatgcggcacagacgttcgcccatgatggtcggcttaccgacgataaacattttcgaggtatcgccgtggaaaccatctttgattacggtgacatcaatgttaacgatatcgccatctttcagcagcttagcatcgtccgggataccgtggcacaccacttcattaatagagatgcaaacggatttcggatagccgtgatagccgaggcaggcagaaaccgcgtgttgttcattaacaatgtaatcattacagatgcgatccagctcgccggtgctgacgcccggtttaacatacggttcgatcatctccagcacttcggcagccagtcggccagcgacgcgcattttttcgatatcttctggggtcttgattgagatagccattaattctgtccatcagcgtcggtgataccgacaatatatatgtaagtgccgtcaatggtatcacacccgggcaaattgagaatcattctgaatttcgccaaacgtgccactgaaggttttctataatagaaaattcgacatctgatgctgtacacagcgccaacaattattggtgtccatgacgtatttgtggtataaagcgcgccggacttccgatccatttcgtatacacagactggacggaagcgacaatctcactttgtgtaacaacacacacgtatcggcacatattccggggtgccctttggggtcggtaatatgggatacgtggaggcataaccccaacttttatatagaggttttaatcatggcaactgtttccatgcgcgacatgctcaaggctggtgttcacttcggtcaccagacccgttactggaacccgaaaatgaagccgttcatcttcggtgcgcgtaacaaagttcacatcatcaaccttgagaaaactgtaccgatgttcaacgaagctctggctgaactgaacaagattgcttctcgcaaaggtaaaatccttttcgttggtactaaacgcgctgcaagcgaagcggtgaaagacgctgctctgagctgcgaccagttcttcgtgaaccatcgctggctgggcggtatgctgactaactggaaaaccgttcgtcagtccatcaaacgtctgaaagacctggaaactcagtctcaggacggtactttcgaaaagctgaccaagaaagaagcgctgatgcgcactcgtgagctggagaaactggaaaacagcctgggcggtatcaaagacatgggcggtctgccggacgctctgtttgtaatcgatgctgaccacgaacacattgctatcaaagaagcaaacaacctgggtattccggtatttgctatcgttgataccaactctgatccggacggtgttgacttcgttatcccgggtaacgacgacgcaatccgtgctgtgaccctgtacctgggcgctgttgctgcaaccgtacgtgaaggccgttctcaggatctggcttcccaggcggaagaaagcttcgtagaagctgagtaataaggcttgataactcccccaaaatagttcgagttgcagaaaggcggcaagctcgagaattcccgggagcttacatcagtaagtgaccgggatgagcgagcgaagacaacgcatctgcggcgcgaaatatgaagggggagagcccttatagaccaggtagtacacgtttggttagggggcctgcatatggccccctttttcacttttatatctgtgcggtttaatgccgggcagatcacatctccgaggattttagaatggctgaaattaccgcatccctggtaaaagagctgcgtgagcgtactggcgcaggcatgatggattgcaaaaaagcactgactgaagctaacggcgacatcgagctggcaatcgaaaacatgcgtaagtccggtgctattaaagcagcgaaaaaagcaggcaacgttgctgctgacggcgtgatcaaaaccaaaatcgacggcaactacggcatcattctggaagttaactgccagactgacttcgttgcaaaagacgctggtttccaggcgttcgcagacaaagttctggacgcagctgttgctggcaaaatcactgacgttgaagttctgaaagcacagttcgaagaagaacgtgttgcgctggtagcgaaaattggtgagaacatcaacattcgccgcgttgctgcgctggaaggcgacgttctgggttcttatcagcacggtgcgcgtatcggcgttctggttgctgctaaaggcgctgacgaagagctggttaaacacatcgctatgcacgttgctgcaagcaagccagaattcatcaaaccagaagacgtatccgctgaagtggtagaaaaagaataccaggtacagctggatatcgcgatgcagtctggtaagccgaaagaaatcgcagagaaaatggttgaaggccgcatgaagaaattcaccggcgaagtttctctgaccggtcagccgttcgttatggaaccaagcaaaactgttggtcagctgctgaaagagcataacgctgaagtgactggcttcatccgcttcgaagtgggtgaaggcatcgagaaagttgagactgactttgcagcagaagttgctgcgatgtccaagcagtcttaattatcgaaaaggagccgcctgagggcggcttctttttgtgcccatcttgtaaattcagctaacccttgtggggctgcgctgaaaagcgacgtacaatgtcgctagtattaattcatttcagtgtgcttgacagtctcaggaaagaaacatggctaccaatgcaaaacccgtctataaacgcattctgcttaagttgagtggcgaagctctgcagggcactgaaggcttcggtattgatgcaagcatactggatcgtatggctcaggaaatcaaagaactggttgaactgggtattcaggttggtgtggtgattggtgggggtaacctgttccgtggcgctggtctggcgaaagcgggtatgaaccgcgttgtgggcgaccacatggggatgctggcgaccgtaatgaacggcctggcaatgcgtgatgcactgcaccgcgcctatgtgaacgctcgtctgatgtccgctattccattgaatggcgtgtgcgacagctacagctgggcagaagctatcagcctgttgcgcaacaaccgtgtggtgatcctctccgccggtacaggtaacccgttctttaccaccgactcagcagcttgcctgcgtggtatcgaaattgaagccgatgtggtgctgaaagcaaccaaagttgacggcgtgtttactgctgatccggcgaaagatccaactgcaaccatgtacgagcaactgacttacagcgaagtgctggaaaaagagctgaaagtcatggacctggcggccttcacgctggctcgtgaccataaattaccgattcgtgttttcaacatgaacaaaccgggtgcgctgcgccgtgtggtaatgggtgaaaaagaagggactttaatcacggaataattcccgtgatggataaataagggtaagattccgcataagtatcgcgggggcgtaagtctggttataaggcgttattgttgcaggcagtttggtcacggccagcgcgcagcaaccggtgcgtacacaagtacgtgaggatggcgagcactacccggggccaaaatggcaaataaaatagcctaataatccagacgattacccgtaatatgtttaatcagggctatacttagcacacttccactgtgtgtgactgtctggtctgactgagacaagttttcaaggattcgtaacgtgattagcgatatcagaaaagatgctgaagtacgcatggacaaatgcgtagaagcgttcaaaacccaaatcagcaaaatacgcacgggtcgtgcttctcccagcctgctggatggcattgtcgtggaatattacggcacgccgacgccgctgcgtcagctggcaagcgtaacggtagaagattcccgtactctgaaaatcaacgtgtttgatcgttcaatgtctccggccgttgaaaaagcgattatggcgtccgatcttggcctgaacccgaactctgcgggtagcgacatccgtgttccgctgccgccgctgacggaagaacgtcgtaaagatctgaccaaaatcgttcgtggtgaagcagaacaagcgcgtgttgcagtacgtaacgtgcgtcgtgacgcgaacgacaaagtgaaagcactgttgaaagataaagagatcagcgaagacgacgatcgccgttctcaggacgatgtacagaaactgactgatgctgcaatcaagaaaattgaagcggcgctggcagacaaagaagcagaactgatgcagttctgatttcttgaacgacaaaaacgccgctcagtagatccttgcggatcggctggcggcgttttgctttttattctgtctcaactctggatgtttcatgaagcaactcaccattctgggctcgaccggctcgattggttgcagcacgctggacgtggtgcgccataatcccgaacacttccgcgtagttgcgctggtggcaggcaaaaatgtcactcgcatggtagaacagtgcctggaattctctccccgctatgccgtaatggacgatgaagcgagtgcgaaacttcttaaaacgatgctacagcaacagggtagccgcaccgaagtcttaagtgggcaacaagccgcttgcgatatggcagcgcttgaggatgttgatcaggtgatggcagccattgttggcgctgctgggctgttacctacgcttgctgcgatccgcgcgggtaaaaccattttgctggccaataaagaatcactggttacctgcggacgtctgtttatggacgccgtaaagcagagcaaagcgcaattgttaccggtcgatagcgaacataacgccatttttcagagtttaccgcaacctatccagcataatctgggatacgctgaccttgagcaaaatggcgtggtgtccattttacttaccgggtctggtggccctttccgtgagacgccattgcgcgatttggcaacaatgacgccggatcaagcctgccgtcatccgaactggtcgatggggcgtaaaatttctgtcgattcggctaccatgatgaacaaaggtctggaatacattgaagcgcgttggctgtttaacgccagcgccagccagatggaagtgctgattcacccgcagtcagtgattcactcaatggtgcgctatcaggacggcagtgttctggcgcagctgggggaaccggatatgcgtacgccaattgcccacaccatggcatggccgaatcgcgtgaactctggcgtgaagccgctcgatttttgcaaactaagtgcgttgacatttgccgcaccggattatgatcgttatccatgcctgaaactggcgatggaggcgttcgaacaaggtcaggcagcgacgacagcattgaatgccgcaaacgaaatcaccgttgctgcttttcttgcgcaacaaatccgctttacggatatcgctgcgttgaatttatccgtactggaaaaaatggatatgcgcgaaccacaatgtgtggacgatgtgttatctgttgatgcgaacgcgcgtgaagtcgccagaaaagaggtgatgcgtctcgcaagctgaggataatccggctacagagagtcgcgctatttgttagcgtagggcttcagtgatatagtctgcgccatctgatcgtaagtagttggctttataaggtcaggtatgccgtggttttacacggctttttttgtataggcttcagtattcctgagtaccgtaaaccctgtcagggaataaaaaacgcgtgatgttgtctgctactcaaccacttagcgaaaaattgccagcgcatggctgccgtcatgttgcgatcattatggacggcaatggtcgctgggcaaaaaagcaagggaagattcgtgcctttgggcataaagccggggcaaaatccgtccgccgggctgtctcttttgcggccaacaacggtattgaggcgttaacgctgtatgcctttagtagtgaaaactggaaccgaccagcgcaggaagtcagtgcgttaatggaactgtttgtgtgggcgctcgatagcgaagtaaaaagtctgcaccgacataacgtgcgtctgcgtattattggcgataccagtcgctttaactcgcgtttgcaagaacgtattcgtaaatctgaagcgctaacagccgggaataccggtctgacgctgaatattgcggcgaactacggtggacgttgggatatagtccagggagtcaggcaactggctgaaaaggtgcagcaaggaaacctgcaaccagatcagatagatgaagagatgctaaaccagcatgtctgtatgcatgaactggcccctgtagatttagtaattaggactgggggggagcatcgcattagtaactttttgctttggcaaattgcctatgccgaactttactttacagatgttctctggcccgatttcgatgaacaagactttgaaggggcgttaaatgcctttgctaatcgagagcgtcgtttcggcggcaccgagcccggtgatgaaacagcctgatgggggtcgcttttgctgaagtatcgcctgatatctgcttttgtgttaatacccgtcgtcatcgcggcgttgtttctgttgccgccggtggggttcgccatcgtaacgctggtggtctgcatgctggcagcgtgggaatggggacagcttagcggttttaccactcgttcgcagcgagtatggttggcggtgttatgcgggttattgttggcgctgatgctttttctgttgccggaatatcaccgaaatattcatcaaccgctggttgaaatctcactttgggcttcgctgggttggtggattgtcgcgctattgctggtgctgttttacccaggttccgcagcaatctggcgtaactctaaaacattgcgccttatttttggcgtgctaaccattgttcccttcttctggggcatgctggcgttacgggcctggcactacgacgagaatcattacagtggcgcaatatggctgctctatgtcatgatcctggtatggggcgctgactctggcgcatatatgtttggcaaattgtttggtaaacataagctggcaccgaaggtttctccgggtaaaacctggcaaggctttataggtggactagcgaccgcagcggtaatctcatggggttatggcatgtgggcgaatctcgacgtcgctcccgtcaccttactcatttgctctattgtcgcagcgttagcctcagtgctcggcgatctgaccgagagtatgtttaagcgtgaagcaggaattaaggacagcggtcatttaattccaggacacggtggtattttagatcgtattgatagcctgacggctgcggtaccggtctttgcttgcttgttgttactggtattcaggacgctttaacggaaggtaatatgctgagttttctctgggatttggcttcgttcatcgttgcactgggtgtacttatcaccgtgcatgaatttggtcatttctgggttgcccggcgttgtagtgttcgcgttgagcgtttctcaatagggtttggtaaggcgctctggcggcgaactgataagctcggcaccgaatatgttatcgccctgatcccgctgggcggttatgtcaaaatgctggatgagcgcgcagaaccggtcgttccggaactccgccaccatgccttcaataataaatctgttggccaacgagcggcgattattgccgcaggtccggttgcaaacttcatttttgctatcttagcctactggctggtttttattattggtgtgcctggcgtacgtccggtggttggtgaaatagcagccaattcgatagctgcggaagcacaaattgcaccaggtacggaactaaaagccgtagatggtatcgaaacgcctgattgggatgccgtgcgtttgcagttggtcgataaaattggcgatgaaagcaccaccattacagtagcgccatttggcagcgaccaacggcgggatgtaaagctcgatttacgtcactgggcgtttgagcctgataaagaagatccggtatcttcgctggggattcgtcctcgtgggccgcaaattgaacctgtactggaaaatgtgcagccaaactcggcggcaagcaaggcaggtttgcaagcaggcgacaggatcgttaaagtcgatggtcagcccttaacgcagtgggtgacctttgtgatgcttgtccgggataacccgggtaaatccttagcgttagaaatcgaaaggcaggggagtcccttgtctttgacattaatcccggagagtaaaccgggtaatggtaaagcgattggttttgtcggtattgagccgaaagtcattcctttgccagatgagtataaagttgtacgccagtatgggccgttcaacgccatcgtcgaagccacggacaaaacgtggcagctgatgaagctgacggtcagtatgctgggaaaattgatcaccggtgatgtgaaactgaacaacctcagtgggccgatctctatcgccaagggggctgggatgacagcggaactcggggtagtttattacctgccgtttcttgcgcttattagcgtgaacttagggataattaacctgtttccgttgcccgtactagacggggggcatctgctgttccttgcgatcgaaaagatcaagggcggaccggtatccgagcgggttcaagacttttgttatcgcattggctcgattctgctggtgctgttaatggggcttgcacttttcaatgatttctctcggttatgagagttagttaggaagaacgcataataacgatggcgatgaaaaagttgctcatagcgtcgctgctgtttagcagcgccaccgtatacggtgctgaagggttcgtagtgaaagatattcatttcgaaggccttcagcgtgtcgccgttggtgcggccctcctcagtatgccggtgcgcacaggcgacacggttaatgatgaagatatcagtaataccattcgcgctctgtttgctaccggcaactttgaggatgttcgcgtccttcgtgatggtgatacccttctggttcaggtaaaagaacgtccgaccattgccagcattactttctccggtaacaaatcggtgaaagatgacatgctgaagcaaaacctcgaggcttctggtgtgcgtgtgggcgaatccctcgatcgcaccaccattgccgatatcgagaaaggtctggaagacttctactacagcgtcggtaaatatagcgccagcgtaaaagctgtcgtgaccccgctgccgcgcaaccgtgttgacctaaaactggtgttccaggaaggtgtgtcagctgaaatccagcaaattaacattgttggtaaccatgctttcaccaccgacgaactgatctctcatttccaactgcgtgacgaagtgccgtggtggaacgtggtaggcgatcgtaaataccagaaacagaaactggcgggcgaccttgaaaccctgcgcagctactatctggatcgcggttatgcccgtttcaacatcgactctacccaggtcagtctgacgccagataaaaaaggtatttacgtcacggtgaacattaccgaaggcgatcagtacaagctttctggcgttgaagtgagcggcaaccttgccgggcactccgctgaaattgagcagctgactaagatcgagccgggcgagctgtataacggcaccaaagtgaccaagatggaagatgacatcaaaaagcttctcggtcgctatggttatgcctatccgcgcgtacagtcgatgcctgaaattaacgatgccgacaaaaccgttaaattacgcgtgaacgttgatgcgggtaaccgtttctacgtgcgtaagatccgttttgaaggtaacgatacctcgaaagatgccgtcctgcgtcgcgaaatgcgtcagatggaaggtgcatggctgggaagcgatctggtcgatcagggtaaggagcgtctgaatcgtctgggcttctttgaaactgtcgataccgatacccaacgtgttccgggtagcccggaccaggtagatgtcgtctacaaggtaaaagagcgcaacaccggtagcttcaactttggtattggttacggtactgaaagtggcgtgagcttccaggctggtgtgcagcaggataactggttaggtacaggttatgctgttggtatcaacgggaccaaaaacgattaccagacctatgctgaactgtcggtaaccaacccgtacttcactgtagatggtgtaagcctcggtggtcgtctcttctataatgacttccaggcagatgacgccgacctgtccgactataccaacaagagttatggtacagacgtgacgttgggcttcccgatcaacgaatataactcgctgcgtgcaggtctgggttatgtacataactccctgtccaacatgcagcctcaggttgcgatgtggcgttatctgtactctatgggtgaacatccgagcacctctgatcaggataatagcttcaaaacggacgacttcacgttcaactatggttggacctataacaagcttgaccgtggttacttcccgacagatggttcacgtgtcaaccttaccggtaaagtgaccattcctggatcggataacgaatactacaaagtgacgttagacacggcgacttatgtgccgatcgatgacgatcacaaatgggttgttctggggcgtacccgctggggttatggtgatggtttaggcggcaaagagatgccgttctacgagaacttctatgccggtggttccagcaccgtgcgtggcttccagtccaatacaattggtccgaaagcagtttacttcccgcatcaggccagtaattatgatccggactatgattacgaatgtgcgactcaggacggcgcgaaagacctgtgtaaatcggatgatgctgtaggcggtaacgccatggcggttgccagcctcgagttcatcaccccgacgccgtttattagcgataagtatgctaactcggttcgtacttccttcttctgggatatgggtaccgtttgggatacaaactgggattccagccaatattctggatatccggactatagtgatccaagcaatatccgtatgtctgcgggtatcgcattacaatggatgtccccattggggccgttggtgttctcctacgcccagccgttcaaaaagtacgatggagacaaggcagaacagttccagtttaacatcggtaaaacctggtaagtgttctccacaaaggaatgtagtggtagtgtagcgatgactttaggcgatcaatataagatcgccgggccacgcaaagaactgcaccctccggtgcaaatgggatggtaaggagtttattgtgaaaaagtggttattagctgcaggtctcggtttagcactggcaacttctgctcaggcggctgacaaaattgcaatcgtcaacatgggcagcctgttccagcaggtagcgcagaaaaccggtgtttctaacacgctggaaaatgagttcaaaggccgtgccagcgaactgcagcgtatggaaaccgatctgcaggctaaaatgaaaaagctgcagtccatgaaagcgggcagcgatcgcactaagctggaaaaagacgtgatggctcagcgccagacttttgctcagaaagcgcaggcttttgagcaggatcgcgcacgtcgttccaacgaagaacgcggcaaactggttactcgtatccagactgctgtgaaatccgttgccaacagccaggatatcgatctggttgttgatgcaaacgccgttgcttacaacagcagcgatgtaaaagacatcactgccgacgtactgaaacaggttaaataagtaatgccttcaattcgactggctgatttagcgcagcagttggatgcagaactacacggtgatggcgatatcgtcatcaccggcgttgcgtccatgcaatctgcacaaacaggtcacattacgttcatggttaacccaaaataccgtgagcatttaggcttgtgccaggcgtccgcggttgtcatgacccaggacgatcttcctttcgcgaaaagtgccgcgctggtagtgaagaatccctacctgacttacgcgcgcatggcgcaaattttagataccacgccgcagcccgcgcagaacattgcacccagtgcggtgatcgacgcgacggcgaagctgggtaacaacgtatcgattggcgctaacgcggtgattgagtccggcgttgaactgggcgataacgtgattatcggtgccggttgcttcgtaggtaaaaacagcaaaatcggtgcaggttcgcgtctctgggcgaacgtaaccatttaccatgagatccagatcggtcagaattgcctgatccagtccggaacagtggtaggcgcagacggctttggttatgccaacgatcgtggtaactgggtgaagatcccacagattggtcgcgtaattattggcgatcgcgtggagatcggtgcctgcacaaccatcgatcgcggcgcgctggatgacactattattggcaatggcgtgatcattgataaccagtgccagattgcacataacgtcgtgattggcgacaatacggcggttgccggtggcgtcattatggcgggcagcctgaaaattggtcgttactgcatgatcggcggagccagcgtaatcaacgggcatatggaaatatgcgacaaagtgacggttacgggcatgggtatggtgatgcgtcccatcactgaaccaggcgtctattcctcaggcattccgctgcaacccaacaaagtctggcgcaaaaccgctgcactggtgatgaacattgatgacatgagcaagcgtctgaaatcgcttgagcgcaaggttaatcaacaagactaacgttccatcttttgttcgccaaactttacggcctgtctcattcttacgattgcggcaggccgtgttattattgtcgtttcttatattttgacaggaagagtatcttgactactaacactcatactctgcagattgaagagattttagaacttctgccgcaccgtttcccgttcttactggtggatcgcgtgctggattttgaagaaggtcgttttctgcgcgcagtaaaaaatgtctctgtcaatgagccattcttccagggccatttccctggaaaaccgattttcccgggtgtgctgattctggaagcaatggcacaggcaacaggtattctggcgtttaaaagcgtaggaaaactggaaccgggtgaactgtactacttcgctggtattgacgaagcgcgcttcaagcgcccggtcgtgcctggcgatcaaatgatcatggaagtcactttcgaaaaaacgcgccgcggcctgacccgttttaaaggggttgctctggtcgatggtaaagtagtttgcgaagcaacgatgatgtgtgctcgtagccgggaggcctgataagtgattgataaatccgcctttgtgcatccaaccgccattgtggaagagggcgcgtcaattggcgcgaacgcacacattggtcctttttgtatcgttggaccccatgtcgaaattggtgagggtaccgtactgaaatctcacgttgtcgtgaatggtcatactaaaattggccgcgataatgagatttatcagttcgcctccatcggcgaagttaaccaggatctgaaatatgctggcgaaccgacccgtgtggaaatcggcgatcgtaaccgcattcgcgaaagcgtcaccattcatcgtggcacagtccagggcggtggattgacgaaggtgggcagcgacaacttactgatgatcaacgcgcacattgcgcacgattgtacggtaggtaaccgctgtattctcgccaacaacgcaacgctggcgggtcacgtatcggttgacgacttcgcgatcatcggcggcatgaccgcagtccatcagttctgcatcattggtgcgcacgtgatggttggcggctgctccggtgtggcgcaggacgtccctccttatgtcattgcgcagggtaaccacgcaacgccgttcggtgtcaatatcgaagggctgaagcgccgcggattcagccgtgaggcgattaccgctatccgcaatgcgtataagctgatttatcgtagcggtaaaacgctcgatgaagtgaaaccggaaattgctgaactggcggaaacatatccggaagtgaaagcctttaccgatttctttgcacgctcaacgcgcggtctgattcgttaatgactgaacagcgtccattaacgattgccctggtcgccggagaaacctccggcgatatcctggggggccggtttaatccgcgctctgaaagaacgtgtgcccaacgcccgctttgttggtgttgccgggccacgaatgcaggctgaaggctgcgaagcctggtacgaaatggaagaactggcggtaatgggcattgttgaagtgctcggtcgtctgcgtcgcttactgcatattcgtgccgatctgacaaagcgttttggcgaactgaagccagatgtttttgttggtattgatgcgcccgacttcaatattactcttgaaggtaacctcaaaaagcagggtatcaaaaccattcattacgtcagtccatccgtctgggcgtggcgacagaaacgcgttttcaaaataggcagagccaccgatctggtgctcgcatttctgcctttcgaaaaagcgttttatgacaaatacaatgtaccgtgccgctttatcggtcataccatggctgatgccatgccgttagatccagataaaaatgccgcccgtgatgtgctggggatccctcacgatgcccactgcctggcgttgctaccggggagccgtggcgcagaagttgaaatgcttagtgccgatttcctgaaaacggcccagcttttgcgccagacatatccggatctcgaaatcgtggtgccactggtgaatgccaaacgccgcgagcagtttgaacgcatcaaagctgaagtcgcgccagacctttcagttcatttgctggatgggatgggccgtgaggcgatggtcgccagcgatgcggcgctactggcgtcgggtacggcagccctggagtgtatgctggcgaaatgcccgatggtggtgggatatcgcatgaagccttttaccttctggttggcgaagcggctggtgaaaactgattatgtctcgctgccaaatctgctggcgggcagagagttagtcaaagaattattgcaggaagagtgtgagccgcaaaaactggctgcggcgctgttaccgctgttggcgaacgggaaaaccagccacgcgatgcacgataccttccgtgaactgcatcagcagatccgctgcaatgccgatgagcaggcggcacaagccgttctggagttagcacaatgatcgaatttgtttatccgcacacgcagctggttgcgggtgtggatgaagtcggacgcgggccgttagttggcgcggtcgtcaccgctgcggtgatccttgacccggcgcgcccgattgccgggctgaatgattccaaaaagctgagcgaaaaacgccgtctggcgctctatgaagagatcaaagagaaagcgttgagctggagtctgggccgcgcggaaccccacgaaatcgacgagctgaacattcttcatgcgaccatgctggcgatgcagcgtgccgtcgctgggctgcatattgcgccggaatatgtgttgattgatggtaaccgctgcccgaaattaccgatgcctgcgatggctgtggtgaaaggcgatagccgcgtaccggaaatcagtgccgcgtctatcctggcgaaagtgacgcgtgacgccgaaatggcggcgctggatattgttttcccgcaatatggttttgcccaacacaaagggtacccaaccgcttttcatctggaaaaactggctgaacacggcgcgaccgaacaccatcggcgcagctttgggcctgtcaaacgcgcactgggacttgcgtcctgattcttgtgtcgagattaagtaaaccggaatctgaagatgtctgaaccacgtttcgtacacctgcgggtgcacagcgactactcgatgatcgatggcctggccaaaaccgcaccgctggtaaaaaaggcggcggcgttgggtatgccagcactggcgatcaccgatttcaccaacctttgcggtctggtgaagttctacggagcgggacatggcgcagggattaagcctatcgtcggggcagattttaacgtccagtgcgacctgctgggtgatgagttaacccacctgacggtactggcggcgaacaataccggctatcagaatctgacgttgctgatctcaaaagcgtatcagcgcgggtacggtgccgccgggccgatcatcgatcgcgactggcttatcgaattaaacgaagggttgatccttctttccggcggacgcatgggcgacgtcggacgcagtcttttgcgtggtaacagcgcgctggtagatgagtgtgtcgcgttttatgaagaacacttcccggatcgctattttctcgagctgatccgcaccggcaggccggacgaagaaagctatctgcacgcggcggtggaactggcggaagcgcgcggtttgcccgtcgtggcgaccaacgacgtgcgctttatcgacagcagcgactttgacgcacacgaaatccgcgtcgcgatccacgacggctttaccctcgacgatcctaaacgcccgcgtaactattcgccgcagcaatatatgcgtagcgaagaggagatgtgtgagctgtttgccgacatccccgaagcccttgccaacaccgttgagatcgccaaacgctgtaacgtaaccgtgcgtcttggtgaatacttcctgccgcagttcccgaccggggacatgagcaccgaagattatctggtcaagcgtgcaaaagagggcctggaagagcgtctggcctttttattccctgatgaggaagaacgtcttaagcgccgcccggaatatgacgaacgtctggagactgaacttcaggttatcaaccagatgggcttcccgggctacttcctcatcgttatggaatttatccagtggtcgaaagataacggcgtaccggtagggccaggccgtggctccggtgcgggttcactggtggcctacgcgctgaaaatcaccgacctcgatccgctggaatttgacctgctgttcgaacgtttccttaacccggaacgtgtctccatgcctgacttcgacgttgacttctgtatggagaaacgcgatcaggttatcgaacacgtggcggacatgtacggtcgtgatgcggtatcgcagatcatcaccttcggtacaatggcggcgaaagcggtgatccgcgacgtaggccgcgtgctggggcatccgtacggctttgtcgatcgtatctcgaaactgatcccgcccgatccggggatgacgctggcgaaagcgtttgaagccgagccgcagctgccggaaatctacgaagcggatgaagaagttaaggcgctgatcgacatggcgcgcaaactggaaggggtcacccgtaacgccggtaagcacgccggtggggtggttatcgcgccgaccaaaattaccgaatttgcgccgctttactgcgatgaagagggcaaacatccggtcacccagtttgataaaagcgacgttgaatacgccggactggtgaagttcgacttccttggtttgcgtacgctcaccatcatcaactgggcgctggagatgatcaacaagcggcgggcgaagaatggcgagccgccgctggatatcgccgcgatcccgctggatgacaagaaaagcttcgacatgctgcaacgctcggaaaccacggcggtattccagcttgaatcgcgcggcatgaaggacctgatcaagcgtctgcaacctgactgcttcgaagatatgatcgcactggtggcgctgttccgcccaggtccgttgcaatcagggatggtggataactttatcgaccgtaaacatggtcgcgaagaaatctcctatccggacgtacagtggcagcatgaaagcctgaaaccggtactggagccaacctacggcatcatcctgtatcaggaacaggtcatgcagattgcgcaggtgctttctggttataccctcggtggcgcggatatgctgcgtcgtgcgatgggtaagaaaaagccggaagagatggctaagcagcgttctgtatttgctgaaggtgcagaaaagaacggaatcaacgccgaactggcgatgaaaatcttcgacctggtggagaaattcgcgggttacggatttaacaaatcgcactctgcggcctatgctttggtgtcatatcaaacgttatggctgaaagcgcactatccggcggagtttatggcggcggtaatgaccgccgatatggacaacaccgagaaggtggtgggcctggtggatgagtgctggcggatggggctaaaaatcctgccaccagatataaactccggtctttaccatttccacgtcaacgacgacggcgaaatcgtgtatggtattggcgccatcaaaggggtaggtgaaggtccgattgaggccatcatcgaagcccgtaataaaggcggctacttccgcgaactgtttgatctctgcgcccgtaccgacaccaaaaagttaaaccggcgggtgctggaaaaactgatcatgtccggggcgtttgaccgtcttgggccacaccgcgcggcgctgatgaactcgctgggtgatgcgttaaaagcggcagatcaacacgcgaaagcggaagctatcggtcaggccgatatgttcggcgtgctggccgaagagccggaacaaattgaacaatcctacgccagctgccaaccgtggccggagcaggtggtattagatggggaacgtgaaacgttaggcctgtacctgaccggacaccctatcaaccagtatttaaaagagattgagcgttatgtcggaggcgtaaggctgaaagacatgcacccgacagaacgtggtaaagtcatcacggctgcggggctcgttgttgccgcgcgggttatggtcaccaagcgcggcaatcgtatcggtatctgcacgctggatgaccgttccgggcggctggaagtgatgttgtttactgacgccctggataaataccagcaattgctggaaaaagaccgcatacttatcgtcagcggacaggtcagctttgatgacttcagcggtgggcttaaaatgaccgctcgcgaagtgatggatattgacgaagcccgggaaaaatatgctcgcgggcttgctatctcgctgacggacaggcaaattgatgaccagcttttaaaccgactccgtcagtctctggaaccccaccgctctgggacaattccagtacatctctactatcagagggcggatgcacgcgcgcggttgcgttttggcgcgacgtggcgtgtctctccgagcgatcgtttattaaacgatctccgtggcctcattggttcggagcaggtggaactggagtttgactaatacaggaatactatgagtctgaatttccttgattttgaacagccgattgcagagctggaagcgaaaatcgattctctgactgcggttagccgtcaggatgagaaactggatattaacatcgatgaagaagtgcatcgtctgcgtgaaaaaagcgtagaactgacgcgtaaaatcttcgccgatcttggtgcatggcagattgcgcaactggcacgccatccacagcgtccttataccctggattacgttcgcctggcatttgatgaatttgacgaactggctggcgaccgcgcgtatgcagacgataaagctatcgtcggtggtatcgcccgtctcgatggtcgtccggtgatgatcattggtcatcaaaaaggtcgtgaaaccaaagaaaaaattcgccgtaactttggtatgccagcgccagaaggttaccgcaaagcactgcgtctgatgcaaatggctgaacgctttaagatgccaatcatcacctttatcgacaccccgggggcttatccgggcgtgggcgcagaagaacgtggtcagtctgaagccattgcacgcaacctgcgtgaaatgtctcgcctcggcgtaccggtagtttgtacggttatcggtgaaggtggttctggcggtgcgctggcgattggcgtgggcgataaagtgaatatgctgcaatacagcacctattccgttatctcgccggaaggttgtgcgtccattctgtggaagagcgccgacaaagcgccgctggcggctgaagcgatgggtatcatcgctccgcgtctgaaagagctgaaactgatcgactccatcatcccggaaccgctgggtggcgctcaccgtaacccggaagcgatggcggcatcgttgaaagcgcaactgctggcggatctggccgatctcgatgtgttaagcactgaagatttaaaaaatcgtcgttatcagcgcctgatgagctacggttacgcgtaattcgcaaaagttctgaaaaagggtcacttcggtggcccttttttatcgccacggtttgagcaggctatgattaaggaaggattttccaggaggaacacatgaacatcattgccattatgggaccgcatggcgtcttttataaagatgagcccatcaaagaactggagtcggcgctggtggcgcaaggctttcagattatctggccacaaaacagcgttgatttgctgaaatttatcgaacataaccctcgaatttgcggcgtgatttttgactgggatgagtacagtctcgatttatgcagcgatatcaatcaacttaatgaatatctcccgctttatgccttcatcaacacccactcgacgatggatgtcagcgtgcaggatatgcggatggcgctctggttttttgaatatgcgctggggcaggcggaagatatcgccattcgtatgcgtcagtacaccgacgaatatcttgataacattacaccgccgttcacgaaagccttgtttacctacgttaaagagcggaagtacaccttttgtacgccggggcatatgggcggcaccgcatatcaaaaaagcccggttggctgcctgttttatgattttttcggcgggaataccctcaaggctgatgtctctatttcggtcaccgagcttggttcgttgctcgaccacaccgggccacacctggaagcggaagagtacatcgcgcggacttttggcgcggaacagagttatatcgttaccaacggaacatcgacgtcgaacaaaattgtgggtatgtacgccgcgccatccggcagtacgctgttgatcgaccgcaattgtcataaatcgctggcgcatctgttgatgatgaacgatgtagtgccagtctggctgaaaccgacgcgtaatgcgttggggattcttggtgggatcccgcgccgtgaatttactcgcgacagcatcgaagagaaagtcgctgccaccacgcaggcacaatggccggttcatgcggtgattaccaactccacctatgatggcttgctctacaacaccgactggatcaaacagacgctggatgtcccgtcgatccacttcgattccgcctgggtgccgtacacccattttcatccgatctaccaggggaaaagtggtatgagcggcgagcgtgttgcgggaaaagtgatcttcgaaacgcaatcgacccacaaaatgctggcggcgttatcgcaggcttcgctgatccacattaaaggcgagtatgacgaagaggcgtttaacgaagcctttatgatgcataccaccacctcgcccagttatcccattgttgcttcggttgagacggcggcggcgatgctgcgtggtaatccgggcaaacggctgattaaccgttcggtggagcgggcgctgcattttcgcaaagaggtccagcggttgcgggaagagtctgacggttggtttttcgatatctggcaaccgccgcaggtggatgaagccgaatgctggcccgttgcgccaggcgaacagtggcacggctttaacgatgcggatgccgatcatatgtttctcgatccggttaaagtcactattttgacaccggggatggacgaacagggcaatatgagtgaggaggggatcccggcggcgctggtggcaaaattccttgacgaacgtgggatcgtagtagagaaaaccggcccttataacctgctgtttctctttagtattggtatcgataaaaccaaagcaatgggattattgcgtgggttgacggaatttaaacgctcttacgatctcaacctgcggatcaaaaatatgctacccgatctctatgctgaagatcccgatttctaccgcaatatgcgtattcaggatctggcgcaagggatccataagctgattcgtaaacacgatcttcccggtttgatgttgcgggcattcgatactttgccggaaatgatcatgacgccacatcaggcatggcagagacagattaaaggtgaagtagaaaccattgcgctggaacaactggtcggtagagtatcggcaaatatgatcctgccttatccaccgggcgtaccgctgttgatgccaggagaaatgctgaccaaagagagccgcacggtactcgattttctactgatgctttgttccgtagggcaacattaccccggttttgaaacggatattcacggcgcgaaacaggacgaagacggcgtttaccgcgtacgagtcctaaaaatggcgggataacttgccagagcggcttccgggcgagtaacgtgctgttaacaaataaaggagacgttatgctgggtttaaaacaggttcaccatattgcgattattgcgacggattatgcggtgagcaaagctttctactgcgatattcttggtttcacgctgcaaagcgaagtctatcgcgaagcgcgcgactcgtggaaaggggatttggcgcttaatgggcaatatgtgattgagcttttctcttttccgttcccgccggagcgccccagccgaccggaagcttgcggcctgcgtcatctggcttttagcgttgatgacatcgatgcggcagtggcgcaccttgaaagccataacgtgaagtgtgaagccatccgtgtcgatccatacacgcaaaaacgcttcaccttctttaacgatccggacgggctgccgttggaactgtatgagcagtaaggcttgtcatcgccgcatttgcccggtaacgtgccgggcattgctactgtaaaatcgcaccatcatgacactcacgctcaatagacaacttctcacctcacgccagattctggtggcctttagcggcgggcttgactccaccgttctgctgcatcagttggtgcagtggcggacggaaaatccgggcgtcactctgcgcgctattcatgtgcatcacggtttaagtgccaatgccgatgcctgggttacgcattgcgaaaacgtctgccaacagtggcaggtgccgctggtggtcgaacgcgtacaacttgcgcaagaggggctggggattgaggcccaagcgcggcaggcgcgttatcaggcatttgcccgtaccctattgcccggcgaagtgctggtcaccgcgcaacatctcgacgatcaatgtgaaacctttctgctggcgctaaaacgcggtagcggccctgccgggctttcggctatgggggaagtctcggagtttgccggaacacggcttatccgcccgttgcttgcccgcacgcggggggaactggcgcagtgggcattggcgcatggtttacgctggattgaagacgaaagtaatcaggacgactcatacgatcgtaactttctgcgcctgcgtgtagtgccgttattgcagcagcgttggccgcattttgccgaagcaacggcccgcagcgccgcactttgtgctgaacaagagagtctgttggatgaactgctggcggatgatttagcacactgccaaacgtcgcaggggacgctgcagattgcgccaatgctagcgatgagtgatgcccgtcgcgcggcgattatccgccgctggctggcagggcagaatgcaccgatgccttcccgcgacgcgctggtgcggatctggcaggaagtggcgctggcgcgggaagatgcctccccctgtttacgcttgggcgcgtttgaaatccgccgatatcagtcgcaactgtggtggattaaatccgtcaccgggcaaagtgaaaccattgtgccgtggcagacgtggctacaaccgctggaattaccggcggggctgggaagcgtacagcttactgcgggaggcgatattcgccctccgcgtgcagacgaagcggtcagcgtgcgtttcaaagcggcaggattgctgcatattgtcgggcgcaacggcggacgtaagctgaagaaaatctggcaagagttaggcgtgccgccgtggctacgtgacaccacgccactgctgttttatggcgaaacgctgattgcggcggcaggggtatttgtgacgcaagaaggtgtggctgaaggtgagaatggcgtaagttttgtctggcagaaaacgcttagttaagtgaaagccggataagacgcatcaaacgtcgcatccggcgaaagtcaatcaggactcgctcaccaccaccgtaccgatttccgggtggctaaagctggtaattttatccagacgtagctcacgggtttcgccagcggcctcgacgaccagatactccacatttttgcgggagactaaatcgctggcttttgcctgcaatttttcgccatctttcagctcaagtgtcagcattaaatgatgctggcaggcgagctcaagattatcgtaatcatcacaattgattggttgatacgtatcattcattgacataatcgctcaccagtaagtttgccgcagcgtatgctgctttttccctgacagcctcagaaagggcgtcgtcggcagccatttcattcagcactttcaaaacgcagcccagcgcgtccggaacgtatcctaagtctccgctggcgatttccgcgtaccgcttgcgtattaactcacaatatttttccacatgccctcctgtcagcactctgacttaaccgtggatgcaagtctaagcctacgaagataaactctgtttcgcaaggtgactataccacactcatttctgcaatatcagcgccgcaactgcacgtattccgttacaatggcctcctgattcgaaaggagttttcttatggcgcttaaagcgacaatttataaagcgacggttaatgtggccgatctcgaccgcaaccagtttctcgatgcctctctgacgctggcgcgccacccttcagaaacccaggagcgtatgatgctgcgcttgctggcgtggctgaaatatgctgatgaacgtctgcaatttacccgtggtttgtgtgccgatgatgagccggaagcgtggctgcgtaacgatcacctgggcattgatttgtggattgagctgggctgccggatgagcggcggattaagaaagcctgcacccaggccgcagaagtggcgctgtttacctataatagtcgggcggcgcaaatctggtggcagcaaaatcagagcaaatgtgtgcagtttgccaatctttccgtctggtatctggacgatgaacaactggcgaaagtaagcgcctttgccgatcgtaccatgacgctgcaggcaacgattcaggatggcgtgatctggttatcggacgataagaataatctggaagttaacttaaccgcctggcaacaaccttcatgattgtgatttcccgacatgttgctattcccgatggtgagcttgagatcaccgccattcgtgcgcagggcgcgggcgggcagcatgttaataagacctcaacggccattcatctgcgttttgacattcgggcgtccagcctgccagagtattacaaagagcgtctactcgccgccagccatcatttgatcagcagtgatggcgtgattgtcattaaggcacaggaataccgcagtcaggaactgaaccgcgaagccgcgctagcccggctggtggcagtgattaaagatttaacaacagaacaaaaagcccgacgacccacgcggcccacccgtgcatcgaaagagcgcaggctggcatcgaaagcacaaaaatcaagcgtgaaggcgatgcgcggcaaagtacgcagcggtcgggaataaaaagaaggaatagatggtgaaaaaagcgatagtgacagcgatggctgtaatcagcctctttactctgatgggatgtaataatcgggccgaagttgatgcgctttctccggcgcaggctgccgaactgaaaccgatgccgcaaagttggcgcggcgtgctgccgtgtgctgattgcgaaggaatcgaaacctctctgttcctcgaaaaagacggaacatgggtgatgaatgagcgttatctcggtgctcgtgaagaaccttcctccttcgcttcctacggtacatgggcgcgaaccgctgacaagctggtattaaccgacagcaaaggtgaaaagtcatattatcgggcgaaaggcgatgcgctggagatgctcgatcgtgaaggcaatccgattgaatcgcagttcaactatacgctggaaccggcacaatccagtttacctatgacgccgatgaccctgcgaggcatgtatttttatatggctgatgcggcgaccttcactgattgcgcgaccggaaaacgtttcatggtagcgaataacgcagagctggagcgtagctacctggctgcgcgcggtcacagtgaaaaaccggtgttactgtcagtagaaggtcactttacgcttgaggctaatccggatactggtgcgccaaccaaagtattagcgcccgatacggcgggtaaattttacccgaataaggattgcagtagtttggggcagtaaacctgcttaaggcagaaacaaacgcaaaattgcctgatgcgctgcgcttatcaggccttgtattatccctccagtgcagagaaaatcggccagttttctctgcctgcagtccgcatgccgtatcgggccttgggttctaacctgttgcgtagatttatgcagcggactgcctttctcccaaagtgataaaccggacagtatcatggaccggttttcccggtaatccgtattttgcaaggttggtttcactatggaacatgaacttcattatatcggtatcgacaccgctaaagagaaactggatgtcgatgtgttgcgtcctgatggtcgtcatcgcaccaaaaaattcgctaacaccactaaagggcacgatgagctggtgagctggctgaaaggtcacaagattgaccatgcgcatatctgcatcgaagcgaccggcacctatatggaacctgtcgctgagtgcctttacgatgctggctacatagtgtcagtcattaatcctgcgctgggtaaagctttcgctcagagtgaaggactgcgtaacaagactgataccgtggatgcgcgcatgctggcagagttctgtcgtcagaagcgccctgcagcctgggaagcgcctcacccgcttgaacgcgcgttgcgtgccctggtagtccgccaccaggcgctgacagatatgcacacgcaggaactgaatcgcactgaaacggcgcgggaagtccagagaccgagcattgatgctcaccttctgtggcttgaagcagagctgaagcgtcttgagaagcagataaaagacctgacagacgatgatccggatatgaaacaccgcaggaaactgctggaaagcatcccgggtatcggagagaaaacatctgcggtattgctggcttatatcggtctgaaggaccgcttcgcccatgccagacagttcgccgcttttgcgggtctgacaccacggcgttatgaatcaggtagcagtgtgagaggggcgagccggatgagtaaggccggacatgtgtcgcttcgcagggcgttgtatatgcccgcaatggtagccaccagtaagactgagtggggacgggcgttccgcgaccgtctggcggctaatggca

SEQ ID NO: 475 - DNA, 11203 bp, Escherichia coli
ccagtagactgagtggggamgggcgttccgcgaccgtctggcggctaatggcaagaaaggaaaggtgattctcggcgcgatgatgcgcaagctggcacaggtggcgtatggagtgctgaagtcaggcgtgccgttcgatgcgtcacggcataatccggtagcggcgtaaaaatcgcggaagggatgaaaaaaacagcgcctgacggcgctgtgtctggcatgcctgcaatccgggaaaccggaccaggaaaaaacttgcaggccataacagtatctacagcatataatgcaacattttgaattagcacgattttgtaggccggataaggcgtttacgccgcatccggcattttgtgcacgaggctggctttatcactgagtcagcccaacaaagcgacccgccttgatataaatcccaggcttcaggtgcccaacatactgtaactgcgtttctggcttaaacgcagagacatcaccaatacgcatatgcatcagatcggcagggctaatccagcccgattgcgccagtgtaagtggatgcccggctttggcaaaggcatccgtgacaaattccgaacaaaaccacgactttttgtctccttcgcccacactgcttaactgcgctttcgccaggccgctgacgcactttggcgaaaatcctcggagaacggattcagtgagcacatctggcgagtcaccataaagggaataaattcgacaatgccgcgatagttataaccgctatctttgattttattggcaaacgcggtgatatctgtggcttgttgcggggtaagatccgggactcgtaagacgaaaagcttatcactatgcttcatcgcttttttaagggaaacaatctggacgccagcgcctgtcgcttctgcaacgttattatcacccagaaagattgcaacgtgactcacagaggaagtgctgaagacgcggattccaaatgaggttaccccaaggcttgaggagaacagcaaatcgccgggtttgagatcaggtgccgttatttcttttattgattgttcggtgaaagagctttgatgctggaatttgacagcccatgtttttgcctcggcatctactgctgtggctgatgggtctggctggctgatatcaacggtacaagccgaaagtaaaagaaagctggggagaaacaggcggcagtacgcctttggtttatccattttatacaatccatgtaaaaaagggccctgaaattcaggaccctttctggcatcagcctttaatctgtttcaccagatattcgacgatgtcaccagtcttaattaactgtttctcgccgttgcgacgatatttatattcgatatcgtcgttgtcgaggttacggtcgcccagcacaatagtgtgcggaataccgatcagttccatatcggcaaacatcacgcccggacgttcttttcggtcatccagcagcacttcgataccttgtgcacgcagttcgctgtacagtttctcagcaagctcttgtacgcggaaggatttgtgcatgttcatcggcagaatcgccacctggaacggcgcgatagcgtcaggccatacgatgccgcgttcgtcgtagttctgctcaatcgccgcagctaccacacgcgttaccccgataccgtagcaacccatcgtcaggatttggttacggccatcttcaccctgtacggaggctttcagtgcttcggagtacttggtacccagctggaagatgtgaccaacttcgataccacgtttgatcagcagcgtaccctggccatccgggcttggatcgcccgccaccacgttgcggatatcagcaatttccggggtagcgacatcgcgatcccagttgatgccgaagtagtgtttaccatcgatgttagcaccagcagcgaaatcactcatcgccgcaacggtacggtcaatcaccaccggaatcggcatgtttaccggacccagtgaacccggaccggcgttaaccacggcacgaatttcttcttcggtcgcgaaagtcagcgggctggcaacctgcggcagtttttctgctttaacttcgttcagttcgtggtcaccgcgcaccagcagcgcaaccagcgggaagctactgccttcaaccgctttaaccagcagagtcttaaccgttttctcaatcggcagattgaactgttcaaccagttccgcgatggttttcgcgttcggcgtatcaaccagcgtcatttcctgggtagcagcagcgcgcggttctttcggcgcgatagcttctgccagttcaatgttcgctgcatagtcagaggtgtcggagaagaccacatcgtcttcaccgctctgcgccagcacctggaattcgtgagaggcgctgccgccgatagaaccggtgtcggcctgtacggcgcggaaatccagccccatgcggctgaagattttgctgtaggccgcatacattgcatcgtaggtttcctgcagggattcctgagaagtatggaaagagtaagcatctttcatcaggaattcgcgggaacgcatgacgccgaaacgcggacgcacttcgtcgcggaacttggtctggatctgatagaagttcagcggcagctgtttgtaagagctaagctcgttacgaatcaggtcagtgataacttcttcatgagttgggccgagtacgaacggacgctcgccacggtcaacaaaacgcagcagttccggaccgtactgttcccaacgaccactctcttgccacaaatcggctggctgaaccaccggcatcgacacctcgatcgcaccggcgttgttcatctcttcacgcacgatgttttcgactttttttcagaacgcgcacgccggtcggcagccaggtatataacccggaggccagcttgcggatcatcccggcgcgcagcatcagctgatggctgatcacctcggcgtcggcaggtgtctccttgagagtggagagcaggtattggctagtacgcatgttgttacggttccagttggaaggtagaacaggctcaaggcgagcctgggacaaaaaaaagtgatttagtttaccagtgcaaaagaaatgtcaaaagagaagggcgtgaatttaacgcggttccagcgcaaagacttcaaaacctgcgtcggtgacgcgccagcgaacgttaaaatcatgtagccagacggcataggttttgcccgtttcctcacctttacgataggccgggcgcgggtcctgcgccagtacttcgcggataaacagcgttaactgcggataacgcttctccagcgtcaaaagctgcttttcgacctctgcggtaaaactcaccgccatctctgccgctggcgcactttgcgcatagctggcactggcatcgggaagcgattcggcaaaggggagatacggtttgatatccaccaccggcgtaccatcgaccagatccagactgccgagcttcagaatcacgctgtctttatggcaaacaacctctttcagctctaccagcgacataccaattgggttagggcggaaagtagagcgtgttgcgaaaacccccattctggcgttaccgccgaggcgcggtggacgcacagtcggacgccagccgccttccatcgtttgatgaaagacgaaaaggatccataaatggctgaacgcttccaggccgcgaacggcgtcggcctggttgtagggagcaatgagatgcagttcgccgttggcgctttttaccagacctggctggcgcggaacggcgaatttttctttatagggtgagcgaataacgcctatttgctcgaactggaaactgctcatttcgccgtaatgttaagcgcagagccgatacatacagcctgacgatagcagcctggcgtaccgctggtgacttcgcagctatgcagtaataccgcattggctttcattttagaggcgttgatttgcatccgcttacgcgcggttggaatgctcggcggagagtcctgattggaggcctggcaagaatcgccactgacttcaccgagatcgcggaacggtttgccgactaattcttctgcattggtataaattcggaccggcgtggcgcgcggcgctttcggttttgcaggctccgctttcggctggggtgcagtgctttgaacgggttcgacaggggatctgcttaacatggaacagccgcttagcatgagtgctactaaacagatcggtaaagcacgcatagtatttcctcaatgtatgatcaaaacgtcaatattgaatcaggagcttgtaaaaatgacaagacgggcaagcgcccgtcctgaatgatattacaaattgtggaaacagcctaaaaattaccagcctttaacagcgccgccgttaaacactttgtttgctgcttcgtaaacttcatcagactgataagcctggacgaatttcttcacgttctcggcgtctttgttatcttcacgcgttacgatcaggtttacgtacggggagtctttatcttcgacaaagataccgtctttagctggagtcaggccaatctggctggcataggtggtgttaataactgccagagcgatttgcgcgtcgtccagagagcgaggcagctgcggtgcttccagctcaacaattttcagattttttgggttctcaacaacatcaagaacggtcggcagcaggccaacgccatctttcagtttgatcaagcccactttttgcagcagcagcagtgaacgaccaagattagttggatcgtttggcacggcaacctgcgaaccatcctgcagttcatccagtgatttgattttcttggagtaaccagcaatcggataaacaaaagtgttgcctactgcgaccagtttgtagccacgatctttcagttgctgatcaaggtacggtttatgctggaaggcgttggcgtcgatatcgcctttgctcaatgcttcgtttggcagaacatagtcgttgaaggttaccagctcaacgtccaggccatatttgtctttcgcaactttctgcgcgacttctgctacctgctgttcggcaccaacaatcacgccgactttaatgtggtttggatctttttcatcctgaccgcagcctaccagtgccagtgatccaatcagggctcccactgccgcaaaggttttgaatttgaacgccataccttattccttcttcaattatttatgttgtgttgaacgttacttgcgagtgacagcccggacgatgcggtcgcctgcgaactgaattaaataaaccagaatgaccagcaataccagtaccgtattcatcaccgtcgcgttatagccgatgtagccatactgatagccaatctgacctaaaccaccggcaccgactgcaccacccatcgcggaataaccgaccagggtaatcagggtgatagttgccgcattcaccagacccggcaatgcttccggtaacagcactttacggacgatctgcatcggcgtggcacccattgcgcgggaagcttcaattaacccggttgggatctccagcagagcgttctcgaccatacgggcaataaacggtgctgcaccaacggttaacggaacaatcgctgcctgcaaaccaatcgatgtaccaacaataacgcgggtaaacggaatcatccataccagcaagataatgaacgggatagaacggaaaatgttcacaatcgcagaaacggtacgatacagcttcgcgttagcaataatttgccccggacgcgtgacataaagcagaacgccaaccggcagaccaatcacaaagccaaaaaaaccggatacgaaggtcattgccagcgtttcccatacgccacgaaccagcagccacatcatcggctcagacataacccagtacctctacttttacatggtgttcctgcagccaggcaatggcggcttgcgtatcttgttgtgtgccgtgcatttcagtcagcatgatgccgaacttaacgccaccggcgtagtccatctgcgcgctaataatgttgttgttgacgttgaaacgacgcgcggtttcagaaagcagtggggcatcgaccgactgaccggtaaactccagacgcagcatcggcacgcagtcagtgaatggctccgcttgcagacgttcctggtaatcttccgggatatccagatgcagggtcgactgaataaacttctgcgccaacggcgttttcggatgcgaaaacacttcacttaccgtgtcctgctcgatcagttcgccattgctgatgaccgccacgcaatcacaaatacgctttacaacgtccatttcgtgggtgatcaacagaatcgtcaaacccagacggcggttaatgtctttcagcagctcgagaatagaacgtgtcgttgccgggtccagcgcgctggtggcttcatcacacagcaatactttgggattgctggctaacgcacgggcaatcgccacacgctgtttctgcccaccggaaagattcgatgggtagctatcatgcttatcgccaagaccaaccaatgacagcaattccgtcacgcgacgtttgatctcgtctttcggtgtgttgtccagctccagcggcagagccacgttgccaaaaacagtacgcgaagagagcaggttaaaatgctggaaaatcataccaatctggcggcgagctttggtcaactcggattctgacagcgtggtcagttcctggccatcgaccagcacgctaccctcggttgggcgctccagcaggtttacacaacgtataagcgtactcttacccgcgcctgaggcaccgataacgccataaatttgtccagctggcacatgcaggctgacgttgttcaacgcctggatggtgcgggtgccctggtggaacactttggtgatattcgaaagttttatcattgattatttattatcgtcattaagttagtcgtggcatctcgaatgcctgaaacgggcaacgccgtcaatgaaatggatgttaaggcatccagacgtctaaatcaatcaggtttatgcgaagagcactttcttgcaggtcgaaacatgcgatactagcgtcacatgccttattaaggagctataaaaggtggcaaagagcgtacccgcaatttttcttgatcgtgatggcaccattaatgtcgatcacggctatgtccatgagatcgacaactttgaatttatcgacggtgttattgacgccatgcgcgagctaaaaaaaatgggctttgcgctggtggtagtaaccaaccagtctggcattgctcgcggtaaatttaccgaagcacagtttgaaacgctgaccgagtggatggactggtcgctggcggaccgagatgtcgatctggatggtatctattattgcccgcatcatccgcagggtagtgttgaagagtttcgccaggtctgcgactgccgtaaaccacatccggggatgcttttgtcagcacgcgattatttgcatattgatatggccgcttcttatatggtgggcgataaattagaagatatgcaggcagcggctgcggcgaacgtgggaacaaaagtgctggtgcgtacgggtaaacctattacgcctgaagcagaaaacgcggcggattgggtgttaaatagcctggcagacctgccgcaagcgataaaaaagcagcaaaaaccggcataatgattaaaagatgagcaattgaaataaaaatgcatttttccacttgtcttcctgagacgactccctataatgcgcctccatcgacacggcggatgtgaatcacttcacacaaacagccggttcggttgaagagaaaaatcctgaaattcagggttgactctgaaagaggaaagcgtaatatacgccacctcgcgacagtgcgctaaagcgcgtcgcaactgctctttaacaatttatcagacaatctgtgtgggcactcgaagatacggattcttaacgtcgcaagacgaaaaatgaataccaagtctcaagagtgaacacgtaattcattacgaggtttaattctttgagcatcaaacttttaaattgaagagtttgatcatggctcagattgaacgctggcggcaggcctaacacatgcaagtcgaacggtaacaggaagcagcttgctgcttcgctgacgagtggcggacgggtgagtaatgtctgggaaactgcctgatggagggggataactactggaaacggtagctaataccgcataacgtcgcaagaccaaagagggggaccttcgggcctcttgccatcggatgtgcccagatgggattagcttgttggtggggtaacggctcaccaaggcgacgatccctagctggtctgagaggatgaccagccacactggaactgagacacggtccagactcctacgggaggcagcagtggggaatattgcacaatgggcgcaagcctgatgcagccatgccgcgtgtatgaagaaggccttcgggttgtaaagtactttcagcggggaggaagggagtaaagttaatacctttgctcattgacgttacccgcagaagaagcaccggctaactccgtgccagcagccgcggtaatacggagggtgcaagcgttaatcggaattactgggcgtaaagcgcacgcaggcggtttgttaagtcagatgtgaaatccccgggctcaacctgggaactgcatctgatactggcaagcttgagtctcgtagagggggtagaattccaggtgtagcggtgaaatgcgtagagatctggaggaataccggtggcgaaggcggccccctggacgaagactgacgctcaggtgcgaaagcgtggggagcaaacaggattagataccctggtagtccacgccgtaaacgatgtcgacttggaggttgtgcccttgaggcgtggcttccggagctaacgcgttaagtcgaccgcctggggagtacggccgcaaggttaaaactcaaatgaattgacgggggcccgcacaagcggtggagcatgtggtttaattcgatgcaacgcgaagaaccttacctggtcttgacatccacggaagttttcagagatgagaatgtgccttcgggaaccgtgagacaggtgctgcatggctgtcgtcagctcgtgttgtgaaatgttgggttaagtcccgcaacgagcgcaacccttatcctttgttgccagcggtccggccgggaactcaaaggagactgccagtgataaactggaggaaggtggggatgacgtcaagtcatcatggcccttacgaccagggctacacacgtgctacaatggcgcatacaaagagaagcgacctcgcgagagcaagcggacctcataaagtgcgtcgtagtccggattggagtctgcaactcgactccatgaagtcggaatcgctagtaatcgtggatcagaatgccacggtgaatacgttcccgggccttgtacacaccgcccgtcacaccatgggagtgggttgcaaaagaagtaggtagcttaaccttcgggagggcgcttaccactttgtgattcatgactggggtgaagtcgtaacaaggtaaccgtaggggaacctgcggttggatcacctccttaccttaaagaagcgttctttgaagtgctcacacagattgtctgatgaaaatgagcagtaaaacctctacaggcttgtagctcaggtggttagagcgcacccctgataagggtgaggtcggtggttcaagtccactcaggcctaccaaatttgcacggcaaatttgaagaggttttaactacatgttatggggctatagctcagctgggagagcgcctgctttgcacgcaggaggtctgcggttcgatcccgcatagctccaccatctctgtagtgattaaataaaaaatacttcagagtgtacctgcaaaggttcactgcgaagttttgctctttaaaaatctggatcaagctgaaaattgaaacactgaacaacgagagttgttcgtgagtctctcaaattttcgcaacacgatgatgaatcgaaagaaacatcttcgggttgtgaggttaagcgactaagcgtacacggtggatgccctggcagtcagaggcgatgaaggacgtgctaatctgcgataagcgtcggtaaggtgatatgaaccgttataaccggcgatttccgaatggggaaacccagtgtgattcgtcacactatcattaactgaatccataggttaatgaggcgaaccgggggaactgaaacatctaagtaccccgaggaaaagaaatcaaccgagattcccccagtagcggcgagcgaacggggagcagcccagagcctgaatcagtgtgtgtgttagtggaagcgtctggaaaggcgcgcgatacagggtgacagccccgtacacaaaaatgcacatgctgtgagctcgatgagtagggcgggacacgtggtatcctgtctgaatatggggggaccatcctccaaggctaaatactcctgactgaccgatagtgaaccagtaccgtgagggaaaggcgaaaagaaccccggcgaggggagtgaaaaagaacctgaaaccgtgtacgtacaagcagtgggagcacgcttaggcgtgtgactgcgtaccttttgtataatgggtcagcgacttatattctgtagcaaggttaaccgaataggggagccgaagggaaaccgagtcttaactgggcgttaagttgcagggtatagacccgaaacccggtgatctagccatgggcaggttgaaggttgggtaacactaactggaggaccgaaccgactaatgttgaaaaattagcggatgacttgtggctgggggtgaaaggccaatcaaaccgggagatagctggttctccccgaaagctatttaggtagcgcctcgtgaattcatctccgggggtagagcactgtttcggcaagggggtcatcccgacttaccaaccgatgcaaactgcgaataccggagaatgttatcacgggagacacacggcgggtgctaacgtccgtcgtgaagagggaaacaacccagaccgccagctaaggtcccaaagtcatggttaagtgggaaacgatgtgggaaggcccagacagccaggatgttggcttagaagcagccatcatttaaagaaagcgtaatagctcactggtcgagtcggcctgcgcggaagatgtaacggggctaaaccatgcaccgaagctgcggcagcgacgctgatgcgttgttgggtaggggagcgttctgtaaggcctgcgaaggtgtcggctagtgaggcatgactggaggtatcaagaacgt

SEQ ID NO: 476 - DNA, 3271 bp, Escherichia coli
gcaccgaagcctgcgkwmakcgacggctgatgcgttgttggtagggagcgttctgtaagcctgcgaaggtgtgctgtgaggcatgctggaggtatcagaagtgcgaatgctgacataagtaacgataaagcgggtgaaaagcccgctcgccggaagaccaagggttcctgtccaacgttaatcggggcagggtgagtcgacccctaaggcgaggccgaaaggcgtagtcgatgggaaacaggttaatattcctgtacttggtgttactgcgaaggggggacggagaaggctatgttggccgggcgacggttgtcccggtttaagcgtgtaggctggttttccaggcaaatccggaaaatcaaggctgaggcgtgatgacgaggcactacggtgctgaagcaacaaatgccctgcttccaggaaaagcctctaagcatcaggtaacatcaaatcgtaccccaaaccgacacaggtggtcaggtagagaataccaaggcgcttgagagaactcgggtgaaggaactaggcaaaatggtgccgtaacttcgggagaaggcacgctgatatgtaggtgaagcgacttgctcgtggagctgaaatcagtcgaagataccagctggctgcaactgtttattaaaaacacagcactgtgcaaacacgaaagtggacgtatacggtgtgacgcctgcccggtgccggaaggttaattgatggggttagcgcaagcgaagctcttgatcgaagccccggtaaacggcggccgtaactataacggtcctaaggtagcgaaattccttgtcgggtaagttccgacctgcacgaatggcgtaatgatggccaggctgtctccacccgagactcagtgaaattgaactcgctgtgaagatgcagtgtacccgcggcaagacggaaagaccccgtgaacctttactatagcttgacactgaacattgagccttgatgtgtaggataggtgggaggctttgaagtgtggacgccagtctgcatggagccgaccttgaaataccaccctttaatgtttgatgttctaacgtggacccgtaatccgggttgcggacagtgtctggtgggtagtttgactggggcggtctcctcctaaagagtaacggaggagcacgaaggttggctaatcctggtcggacatcaggaggttagtgcaatggcataagccagcttgactgcgagcgtgacggcgcgagcaggtgcgaaagcaggtcatagtgatccggtggttctgaatggaagggccatcgctcaacggataaaaggtactccggggataacaggctgataccgcccaagagttcatatcgacggcggtgtttggcacctcgatgtcggctcatcacatcctggggctgaagtaggtcccaagggtatggctgttcgccatttaaagtggtacgcgagctgggtttagaacgtcgtgagacagttcggtccctatctgccgtgggcgctggagaactgagggggctgctcctagtacgagaggaccggagtggacgcatcactggtgttcgggttgtcatgccaatggcactgcccggtagctaaatgcggaagagataagtgctgaaagcatctaagcacgaaacttgccccgagatgagttctccctgactccttgagagtcctgaaggaacgttgaagacgacgacgttgataggccgggtgtgtaagcgcagcgatgcgttgagctaaccggtactaatgaaccgtgaggcttaaccttacaacgccgaagatgttttggcggatgagagaaagattttcagcctgatacagattaaatcagaacgcagaagcggtctgataaaacagaatttgcctggcggccttagcgcggtggtcccacctgaccccatgccgaactcagaagtgaaacgccgtagcgccgatggtagtgtggggtctccccatgcgagagtagggaactgccaggcatcaaattacgaagaatggcactgacctttgaggcagttcactactcgataagagagtaggacaaaagcgaaagcttttgaacgttgcgaagcaacggcccgaagggtgaatcacgaagtgattcataaactgccaggcatcaaattaagcagtaagccggtcataaaaccggtggttgtaaaagaattcggtggagcggtagttcagtcggttagaatacctgcctgtcacgcagggggtcgcgggttcgagtcccgtccgttccgccacttattaagaagcctcgagttaacgctcgaggtttttttcgtctgtatatctattattgccagaatcgcaaaaatcctctgcattttacgctctttttcctcaacagtctgaagcccataatcacctcagttaacgaaaatagcattaaaagaggcatattatggctatccctgcatttggtttaggtactttccgtctgaaagacgacgttgttatttcatctgtgaaaacggcgcttgaacttggttatcgcgcaattgataccgcacaaatctatgataacgaagccgcagtaggtcaggcgattgcagaaagtggcgtgccacgtcatgaactctacatcaccactaaaatctggattgaaaatctcagcaaagacaaattgatcccaagtctgaaagagagcctgcaaaaattgcgtaccgattatgttgatctgacgctaatccactggccgtcaccaaacgatgaagtctctgttgaagagtttatgcaggcgctgctggaagccaaaaaacaaggtctgacacgtgagatcggtatttccaacttcacgatcccgttgatggaaaaaacgattgctgctgttggcgctgaaaacatcgctactaaccagattgaactctctccttatctgcaaaaccgtaaagtggttgtctgggctaaacagcacggcatccatattacttcctatatgacgctggcgtatggtaaggccctgaaagatgaggttattgctcgtatcgcagctaaacacaatgcgactccggcacaagtgattctggcgtgggctatgggggaaggttactcagtaattccttcttctactaaacgtgaaaacctggaaagtaatcttaaggcacaaaatttacagcttgatgccgaagataaaaaagcgatcgccgcactggattgcaacgaccgcctggttagcccggaaggtctggctcctgaatgggattaagcctctctgacagctcctccgggagctgttttacatgctcgctaaggaaatcgataaaagcccggatgc

SEQ ID NO: 477 - DNA, 39406 bp, Escherichia coli
  modified_base (30197)..(30197): a, c, t, g, unknown or other
caacgaccgcctggttagcccggaggtctggctcctgaatgggattaagcctctctgacagctcctccgggagctgtttttacatgctcgctaaggaaatcgataaaagcccggatgcgcgtacttaccgcacggtcgctgtaatagactgcactgaatggcatttccactggcaacactttatctgccattaactccaccaattctccgcgagcgatttctttgtcgatcatgtagtcggacaaacacgcaatcccgttgccactcaggcaaagctgtttcagtgtttccccactattggatgacaaaccgtacttcacctcatgtaattgtccatcgctacgggctatcggccaggtattgagggaagcgggttcagtgaatcccaggcaaatatgttgctttaaatcgtcgatcgtttctggcttcccgtagcgggaaatataatcgggggaggcgataatttttcgataactgttaaataacggcctggcacgtaagctggaatccgttaacgtaccagcgcgtatcgcgacatccacttttctttcgatcaaattaataatcgtttcggaggagactagcgacaaagtgacttccggatagcgttcacggaaaggcttaattaacggcatcagaaagtgcagcaccactggagttgcggcatcgatccgtaacagtccacgcggtgtattacgcgtctccataatttctgattctgccgatgccatctcctgcaaaattgactgtacgcgacgaaaataacgctcgccttcttccgtcaggctaagttgtcgcgtggtccgattaagcaggctaacgccaagtttcatctccagctttttcaccgcccggcttaccgctgagtttgcttgccctaattgttccgctgcccggctaaagctgccgctttcgacgaccgaaacaaaaatggcgagttcttccgacgtggctttcatttttgctcctgttgcaaaatagaagagatattttgaatttatttgtcattaaaccatcaggatgcgtgatatgtcatgcgatttaatgttctccataatgagcaaaattctgaccggtgtaagcacttgcttacataacaatatacaattgctcgttgaaagagtgagctaaaatccctataacagtagaaccctcccgagtgcggaagggttgacgtaatagaggtttcaaaagtcaaaagtgcgaaaaaacacctatgccatgcgctatgttgccggacaacctgcggaaaggatcttaccgccggggtcttttgcgagcatcggccaggcattaccacctggagaaccgttaagtaccgaagagcgtattcggatcctggtgtggaacatatacaaacagcaacgcgctgaatggttgtcggtattaaagaactacggcaaagatgcacatctggtgttattgcaggaagcgcagacaacgccagagttagtacagtttgcgaccgctaactatcttgccgccgatcaggtacccgctttcgtactgccacaacatccttctggcgtaatgaccctttcggcggcgcatccagtgtattgctgcccgttacgtgaacgagaacccattttgcgtctggcgaagtcggcactggtgacggtctatccattacctgacacccgcctgttgatggtggttaatatacacgccgtcaacttcagtctgggcgtggatgtctatagtaagcagttacttcctattggtgatcagatagctcaccacagcggcccggtcattatggcaggagatttcaatgcctggagccgtagaaggatgaacgcgttatatcgctttgcgcgggaaatgtcgctgcgccaggtgcgttttaccgatgatcagcgccgtcgggcgtttggccgcccgctcgattttgttttctaccgtggtctgaacgtcagcgaagcttctgtactggttacgcgcgcttccgatcacaatccgctactcgttgaattcagtcccggcaagcctgataaataaggtatgtcaggtctgccacagggcagaccaacgtttggcgctgtccttttatactcaaacaacaaaaggacagcgcaatgacaacacaatcccaccatgaccacgtagaaaagcagtttagctcgcaggccagtgagtatttaactagtaccgtacatgcatccgggcgagatttacagcgcctggcggtgcgtctggctgattatcctgatgcaagtgtacttgatatgggctgcggagcagggcatgccagctttgtcgctgcgcagaacgtgagcgcggtggtggcgtatgacttatctgcccaaatgctggatgtcgtggcacaagctgccgaagcccggcaactgaaaaatatcaccacccgccagggttatgccgaaagtctgccatttgccgataacgcatttgatattgttatcagccgttattctgcccatcactggcatgatgttggtgcagcactgcgagaagtgaataggatattgaaacctggcggtaggatgattgtgatggacgtaatgtctccgggtcatccagtgcgcgacatctggttacagacggtagaagcattacgcgatacctctcacgtacgaaactacgccagcggtgagtggttgaggttaatcaatgaagccaatctgatagttgataatttaattacagataagttaccgctggaattttcttcatgggtcgcgagaatgcgtacgccagaagcgttagtagacgctattcgcatttaccaacagagcgcatcgacagaggtgagaacgtattttgccttgcagaatgatggctctttcaccagtgatatcatcatggtagaagcacataaagcagcataaataaaaaaggcaccgggggaatcggtgcctttttattatctggtttgtcaggaatctggcatgttgttgtttttcacaaacaacgtcagcttgtcgcctggttgcagattcgcagtgtcgctgttccagcgcatcacatctttgatgttcacgccgtggcgtttagcaatgcttgaaagcgaatcgcctttgcgcacacgatacgtaatgctatcgctgttgtttgccagtcgctgtgcgctactgcctgcaccaatcgtcaaactttggcctggcttcagcttagatccgcgcagtttgttccactgctgcaaatctttggtgcttacgccgagacgtgaagcgatacttgaaagcgtgtcgccagagcgtacggtgtaaacacggctgttaagcggcgtattgtcggcaaccagcgtcgactgtacagcagcaatttcgcctgaagcgagagattcacgcagttgatctgcatgcttctttggcaccatcacgtattgcggaccacttgcgcccagcgtggagcctttcacgccagcgttgaatgtcttcagcttgctgacggaaatccccgccatatctgcaaccttcgccatttcaaccgggctgctcaggtgcacacgcgccagagcacggctttcatcggtcgttggcagacgtacgccataacgcttgctgtttttgagaatatcactcaatgccagcattttaggcacgtactgcttcgtttcctgcggcaacggtaacgaccagaagtccgtggatttcccacgcgctttgttcgttttaattgccttcatgacccgaccttcgccgctgttataagccgctacggtcagaagccagtcgccgtcaaacatcttgttcagacgctgcatcatgttcagcgcggcagttgttgaagcaacaacatcgcgacgcgcgtcataattgcgggtctgtttcaaaccataattgcgccccgtgctcggaatgatctgccagatgcctgcggcattggcgccagacgttgcgtgaggatcaaaagcgctctccactatgggtagtagtaccagttccataggcatgttacgttttttaacttgcccggctatccagtacatatacggctctgcccgtaaagttacatcgtggagatagctcttattgcgtaaatatttctgtttctgttcgcgaatccggtcattttccggaattcccatctttagctcgtcgccaatgaaagcccacaagtcaccatctggcgcgatagacgtcccatcgtccatccatcgtgcctgacttgtaaactttgctgcttccccttgaccagctgcagaaaggctctgtgcgtgctgttgaacgttgccggtactctggcaacccacgagcaggacagaggcgagtaatatcgcttttgccttcatgtgtgtgtcaatagttgcttaaaagacgaccgatcataacggcgaacggagccgatgacaagaaagttttatcagaacctatctttctttgaccttaaccatgcaaaacgttcttcaggttgttgcaataatgtttcttcattaattacattaattaaatcaatatcttctgttcttaaaaaaacattaatttgccgctcatttttcagaattacgggtagtgttatttgattttttgcccgtaactccttaactttacgataataatcatttatggacaaatcgtgcggaagaatactcaaagcaaacttcatatttgataacgtatattcatgagcacaacataccaatgtatcgtcaggtaacgcacttaacttattaagtgattgatacatttgtgatgctgtcccttcaaacaacctaccacacccaccagaaaacagcgtgtcgccgcaaaatagataaggtttactgaagtaacagatatgtcctaaagtgtgacccggtgtggcaattacactaaattcatgccccaaaacgaaggcagtttcgccatctttgactacctgtgttgttcccttatcttgtgtctcttgtggaccatacaccacaatttgcggaaacttttccaccagttcttttacgccgccaacgtgatcgtgatgatggtgggtgagaaatatggcctccggttgccagttattggcggtaatggcgtttaatactggctctgcgtctccgggatcgacaatcaggcagcgacctgcttcatcattcaaaacccagatgtaattgtcatcaaaggcgggaatactgttaagattcatagattacctcttagtgtgaaacggaaggttgtgatgaaaccggcaagagtccctcaaactgtcgtggctcctgattgctggggcgatttgccctggggagagctttatcgcaaggcgctggagcgccagctcaacccgtggttcactaaaatgtatggttttcatctgcttaagattggcaatttaagcgcagaaatcaattgcgaagcgtgcgcggtttctcatcaagtgaatgtttctgcgcaaggaatgcccgtccaggtacaggcggacccacttcatcttccttttgccgataaatccgttgatgtttgtctactggcacatacattgccgtggtgcaccgatccgcatcgtttattgcgtgaagccgatcgggtattgattgatgatggctggctggtgattagtggcttcaatcccatcagtttaatgggattacgcaaacttgtgccggtattgcgcaaaacctcgccctataacagccggatgtttactctgatgcggcaactggactggctctctttgttgaattttgaagtgctgcacgccagccgtttccacgttctcccgtggaacaaacacggtggaaaactattgaatgcacatattcctgcgcttggttgcttacaacttattgttgcccggaaacggactattcctttaacgctaaatccgatgaaacagagtaaaaacaagccacgaattcgccaggcggttggagccacccggcaatatcgtaaaccacaggcttaaacttcgacttgatagcctgtatcttccagtgtgggattcattgccgcagcacgggccagttcatcacagcgttcgttttccgggtgtccggcatggcctttaacccattcccatttgatttgatgctgccccaatgcagcatcaagacgttgccagagatcgacattttttactggttttttgtctgcggttttccagccacgttttttccagctatggatccactgagtgatcccctggcggacatactggctgtcggtactcaaaatgacttcgcaatgttcttttaacgcctccagcgcgacaatagcggccatcaactccatacggttgttggtggtgcgggtgtagcctgcgctaaaggttttctcgcgtccgcgatagcgtaaaatagcgccgtaacccccaggtcctggattgcccagacacgaaccatcggtgaaaatttctacctgtttaagcatctctggtagacttcctgtaattgaatcgaactgtaaaacgataagtctgacataaatgaccgctatgagcactgcaattacacgccagatcgttctcgataccgaaaccaccggtatgaaccagattggtgcgcactatgaaggccacaagatcattgagattggtgccgttgaagtggtgaaccgtcgcctgacgggcaataacttccatgtttatctcaaacccgatcggctggtggatccggaagcctttggcgtacatggtattgccgatgaatttttgctcgataagcccacgtttgccgaagtagccgatgagttcatggactatatccgcggcgcggagttggtgatccataacgcagcgttcgatatcggctttatggactacgagttttcgttgcttaagcgcgatattccgaagaccaataccttctgtaaggtcaccgatagccttgcggtggcgaggaaaatgtttcctggtaagcgcaacagcctcgatgcgttatgtgcccgctacgaaatagataacagtaaacgaacgctacacggggcattactcgatgcacagatccttgcggaagtttatctggcgatgaccggtggtcaaacgtcgatggcttttgcgatggaaggagagacacagcagcaacaaggtgaagcaacaattcagcgcattgtacgtcaggcaagtaagttacgcgttgtttttgcgacagatgaagagcttgcagctcatgaagcccgtcttgatctggtggagaagaagggcggaagctgcctctggcgggcataaatacctgtaaaaggcgctaaaaatagcggcttgggcgatttttgcagcaaacgattcaaaagatgagaaaaaccgttgacgaagggtgaggcaatccgtaatattcgcctcgttcccaacggaacacaacgcggagcggtagttcagtcggttagaatacctgcctgtcacgcagggggtcgcgggttcgagtcccgtccgttccgccaaattcactcatgaaaatgagttcagagagccgcaagatttttaattttgcggtttttttgtatttgaattccaccatttctctgttcaatgattttattctggcgtaagtgcgtgattctcgcttgttgtctcattcattaaaattcaataatgatatcgaaccattcagcttaaatatatttccagagaataaatttatattgattaaatgaatgtatatttcaaattgattttgtttgttattatttaagtggggtatataattagagtccgttatcaatgctaaatattctaatcattatgacaggcgagggagtgtccaattatgaattcaaaaaagctttgttgcatatgtgtgttattctcgctgcttgcaggatgtgcctctgaatcttctattgatgaaaagaagaaaaaagctcaagtcacacaaagtaatattaataaaaacactccccagcaactgacagacaaagatttattcggtaatgaaaccactctggccgtatccgaagaggatattcaagctgcgcttgatggagatgagttccgcgttccccttaattctcctgtaatacttgttcaatccggcaaccgcgcaccggaaaccattatgcaggaggagatgcgaaaatattatactgtttccacattctctggtatcccggacaggcaaaagcctctgacttgtaacaaaaacaaagataaaaatgagaacgaggatgttgccagtgctgagaatatgaactggatgcaggcactgcgttttgtggctgcaaaaggacatcagaaagcgattattgtttaccaggatacattgcagacaggaaaatatgactctgcgctgaaatcaacagtatggtccgactataaaaatgaaaaactcaccgacgctatctccctgcgctacctggtacgtttcacgctggtggatgtggcaacaggtgagtgggctacctggtcgccggtgaattatgaatataaagtgcttccaccattgcccgacaagaatgaagccagtacgactgatatgacagagcagcaaatcatgcaacttaagcaaaagacctataaagcgatggtaaaagatttggttaaccgctatcaataataaattatatctgccgccaggaatttctggcggcaataatacaaaattctttgcatcagaaatttttcttgacaaagacagtgcaagaaaggacatggaatccggagttaaaaactgtttgttttagaatatttaattatttaactgctgaatcttccttgcgagaaatatattcattattacatttcatgccatttttaatatagattgctcctgggaaaatccccgtattattaccgcaggggtgataattagcattgacatatcctgtgacaaaaggagctattaaaggtgctattacgatagctattagtaaaaatataagagttagctgtattgttatgtctgtggcgaaattgactaccttcgtttttttgattaagaatgattttattatcgtaagtaaaattacatgaacatttaaaaaggaaaacgacatgaaaccaaagcacagaatcaacattctccaatcataaaatatttccgtggagcattttattattgaatatagaggtttaactccggtaaaaaacaaagaagcattgaatgcagggaaaaataatatggccataaaaaacatcgaaagaaactcttttaatttaacatgtaaacgcatggttaatcctcatatcacgggtggagtgttaagaacatacataaatggagtcatgttttcccttttccatttatcaagttcctgttgccgttttagtccatctctaattgcatattttaatttttctgataaatggcattgagcatcgatttcatttaaaacaactgtacacactatccctgtcagtaaaattgctcctccgacaagaattactggaaagccaaagctaacacaggcaaaagaagccaggcttccaatagcggttgcaacaccaccggctataactgctttggccacatccattgaaaaatcgccaagaaaattaaccagatctcgctctgaactcataataaattctatggttctccaggctactgaaaaccagatacagaacttaactccttttattgattcagataaagctcctcgccagccaatagcgagttccagaacttgaggcgctcgtgaagagaaaatatatttaccgagcttttctaaaagccaggggctggatgttgtgatttttatatatttctctccaagtatttcaaagtaacttgcttttgtatactttaaggcattaaggttaaatataattttcccattgtcatcaaactcagtcattaatttactcgcgttaactaaccaggcgagtgtatcttttatacctgaaggatgtgtagtgataaaatgaatgtaatcaaatgatgttattgggctgagtattttttttgcaacatcaagtgtcaagagaataacatgatgagtgttctgatgccttaactcatcaatgagtgggacgtcgttaagataagggtgctgaggtactagctggtttatcggctgagccccccgaagaatgtcacccacataatcagcccactgtgcattctgtgtgttgttgttattccttaaaccagccattttatctctccgcaatagtaatttattatgttattacagtaagttactgtacacgatcctgccatttactcattgcattcgtaccggctaacgtatgctcccaggaaatatcttcataaataaaggcaattctctcctgtggttccagttctttttccaggacagcatgcggtgtgacaaaatcaatacttgatattcgggcttttgacagatttattttataataaggctggtaaatacccgctttactggttcggtagagtataaattcacatattaccattttttcattgtcactaagtgcttttgccagcaatggtgaggatttatcaaccggtttggtgataattaattcatgatgattgacattttgacttcttgagatggaatgcattaacgcataaaccatgatctgatctttatgttctggctgcgctttgtttccgacagaatcaagcgttgagcaacctgctgaaattagcccttgtgtctctccactcaaagataaataacttatatttgccatgataatctcctttaattaaataattatttttcggccgtggtaccggttgccgcctctggcatgacgttattcttcagcagcagccagcggcttaacacgccttcgagtcgctcattaatttgtttttccagcgcatctgtattctgcttctgcgcacgggcatcatggtactgcgtcaacagagactcaacgggtgtttcctgccccagtccccgctccgcctgccagatgacatttttgatataggaaagggttagtccctctttctcgcgctgcatcactagatctgcaaaagcatgtaagtcctggcgggtctgcaaccagccacgcaactgcgggctactctgtgcgcgggttttgagtgcctcattccattgtgtcgaggcctgttgctgttgcaggctttccggccagcgactgtcggcaacacgcatcatctgcatcccggtttccagcggctgtaccggggaggtatcaagaagttgttgcagcctgcgctcatagttttcgagttcaggtgaggccatccacaccgttgctgcgccctgagcggtgtcgttaacctgtaacagttgctgctgcaccggatagacctgccaccaccacaatgctgaggcgacagccactgaacaggcgatccctgcgataaaccctcttaccgtactgccttgctttatcacactggcctgtgggggattctctgtcagactgcgcacttccactttcatctcaggcaggccgggcaggggaggcactaccgcttctggtgtggaagatgcctgtgtttccggggcataaatcagcgttctgaccgtggtctgtgcggcgttctcagtgttactcttcagctggggttcaagccgtttacgcgtgttctgcataaaatagagcagattctccacgcgcggaacgcgcttcagttccacctgctggagcttatcgcagataagctgcaatgcccgctctgtgcggtagatcagtggtaggtcggattccgcaaaggagatttgctgacgcagaatattgccggttcgggagttaaaccagtccagcatttcagtacgcgccgggccgccctgcggccagaacttatcccagtcgtggcttaccattgccgccagcagttccgcaccttcgcagaatcccgccagtccctgtgtccgtgtccgggcaagcgtatagtaggtggcggtgtgtaaatccacaccgttggctttaaaaatcgccagcgccagcgactccaccagtttccagttcagctcaggctgtgacgggtggctggctttgtttatttcctcgcggatggcgctgaattccggcagcccgcgcgggtcactgccggtaacgatagtttgtgtcagtacgttactattcatccctgcctcctcagtacagtgtgtctgacagaccaaactggctgaacaacccaccgctgaacgggttatcttccgtgtcggtatgcacacggtaggtcatcgcgccaccgtccacgctaaagcgcacggtaaagttgccatcctgtactccggtcagttgtccggccccgaacaggcggaactgcgcccacggcccgctgaagctgatactgcgcggcgcgttgccgctggtgccgatgagcgtcagcttactttcgttgccttcgcgcatgttgttaggccagaccagatgggcggtatagttacggccctggctgtaatcgactaactgaccgtcaaggttcagtacactgcggcgtttattgcctgaaagcgataccgtttccacggcaaaggatgttcccagaccgttctgtttgctgaagaagatgtcacggattttctgcgcagtttccagttgcgcaataatatcttcgcgaataatgacgttgttatcgccatcctccagactcaggtcattatcgataaacagcttcaggttctgctggtagaaggtatccagtatgccatccggtttaaagaagcgttcgaaggcatccagtgaggcatcctgtgcagaacgcggattaaacggatagttatttgccagttgctcgttaaacggtttcaccacgctgtcgcgccagtccacttccatataatgaacagcctccaccatcaccacatgccaggcctggtcagccagcctgccaacccagcggttgagcggagcaggcagcgtttttgccatctggcgggtggcgaatatcggatcgctgctgttctgatcaagccgtaactgcacggctttcagcgccgatttccctggtacaggcgcgttctggattgccagcaggtagcggtgcaactcggtgagttgctgatacacggcctgcatcgtgctttctttgtctttctgtactgccagggtactgttttccggggcgaattcatgcccgaggcgggtgagtaactggtaatccggctctgccagggcttcctcccgttctttggcagagagtttttcagaaaagacgcctggctgtgtgttgtcacgcagcacggtcagcgcccgctgcaaaggctggtcgccgctgataacctgctccagcgccccggtcagttgtccgatggactcaaaattgcggatattcagattgtccatcccggcccgccaggtggcggtgtagtcgctgatatactgctcggtcaactggcgctggatttccgcgcggtcggcgtcactgtatttcacattgcgggtgaggttaagtacccaggaatccatcgccgtcagttcaaccagttcatcgcgctgttttacaaaatagctttgcaggccgtaacgggtaagaaactgtggaacaaccagtttgttgtcatcggcagatgtaaacacctggtcaaaggttggccctacctggtcacgcagattgaggtcggcaggaagaacgcccagcgcccgcgttttcaggctctggtaaacccgctggtagacaggcagtttgctcagttctttctgtgctgataccacgggcttgtcatatggcgtccagcggctgatggcgtcaccgtcgcccgcctgacgctctgcatgccagtcagtatgagccagcgcgtagtcaagatgggacatcagttgtgcctggatatcgcgctggccgtggaatttttcgctccagcgttttgccatatactgcttcaccacctgattgttacgtccgcttttgtcctccagcattcgcatcacgcgcagcaccgcgagtttttcttcactctccggcggcgcggcgttcatcgctttgaccagcccgttaaacagcgagggcaggtaacgttgctccagcagttgcagataggtctgttccacataaggcccgatacgtcgtccctggtacagtcccatatcggccagacggctgcggtcgccccagtcgccataggccagtgtggcatcgcgtaccgggttcaggagcggcagttgcaggttgccaaagtcatcttccccctgcggaggcggcacgtccataaaggctttggcctgcttaagcacggtgatgccggactgatagttaccgttgtaatagtgatgccagccggtgatgagcagcagtgctgccacgccgcctgtggcagagaaaaccgtcaggcggcgacgggaacgtatcagccaggcgcggctctctgttgccagattaggctctgcgagtaatgcctgcgggaacaggctgcgggtgaaataaggcgcggtgtccaccaggggccaggacgccagtgggttattgcccagccggtactggcgggcggcagactgggtgaatatatcatccatctgtccacgctgaagcgaagaggtgagatagacaccacgcagcatcacgttcatattttcgccatcaagcagaccctcaagcagtgacaccagcggttcacggcttccctgcatctggcgggaaaaactgaataaagacgcgcgggtgtgagtctgagcgaccatcagatccggcaacgccagattcattcgatccacccatgtctgccagaaagcattcaactctgttcgccagtcatcattttcatgggcacggcgggtgaacgtgacgcccagaatcgcatcgcgatcctgtctgttgagtgactggaacagggcggcaaaaccctgtaataaatcaagccgggtcagtaccacgtaaaccggtaactggcagtgaagatgctggcgtatatcctgtaagcggctgcgcagcgtctgtaacagatgctcgcggcggcgtttgtctgcggtcagcagatcgggtaaatcgagtgtcagaataatcccgttcagcggctggcgcgcgcgcttttctttcagccagccgagggcatgttcccacagacggcgatgcaggatatccgcatcagcgggagcgcagagtgtgccgtcgatatcaaagatcaccgcctgtttaccgacatggggcgtgaggtacaggcgttgttctgcgccgcgtgcgccctccggggcataaataatgtcggacggaaacccctcgcgcagcagtgtcgttttgccactgcccgccgggccgatgaccatataccacggcaactgccacaggaaacggcggttgtcgagatggcgttgcaggcgcagcagccagcggtcaagataacgctgctgggcgttcagttccacgctgagcggatcaacggcttcctcgcgctgttgcttttgcattttttcaagctgttgcaggcgcttcatcacccggacggtaagccacaccagggcaataatcccccacgccgccgttgccagccagcggttcgccagtggtttgagccactgctcttcatacagcgtccacgtcgggcctttccaccagatccaaaccagcaggaaaatccacgccagtatcagcagccagaatgcagagactttaaatcggggcatcgccgggcgcagggctgatttgagtccgctgaatagtcggggtgttggtaatctgaacacaaaaactcctgttctcttttattgttctgccgtgaatttttgttctagctgctcaagcagggacggctcccagtctgccaccatcatctgcaatcccatcctgaacaacatcctgtactgctgttgcgcaagctgtaccagccccgcctcttccataagctgcgcgccaaaatactgccggtggaactggtcgcggggttcaccggcgggtaacgtatccagataccgtaaggcggcttccagcccctgctcatcaaaacacaaccgcgcagcctgaatatcttcattactcacctgtatgactggcgcggactggttacctggctgatttgcaagccattgcttcgttttttcagaaacaaacggtgtgtggtcgttaaacagaagatcagcgagcgcgggcagacggccaagaaaggaaacgacttcatcgcggatggcatcggctacagcggtataaccaagacggtgcgccgtctgtgcagaaatgtagtgaccgtccagccagtagggtgccagcagtacgcttttttccacctgctgccacagctccatatccgcgctggcaagccgggactggtaatccgccaccatatcggcagagaccgcagccagtggagtacgtctatcgcttttcgcctggggcgtactggtgatggttagccacagggcatggcgacgcaggcgatagccctgcggcgattccggttggcgctcgcataaaatggccgccacttttaacagtgtgtcgcgccaggttttgtcgtcgtgactgtcgatggcgatctgtggagtcggagtactggtatgcgtcacgccgctttcagacgtggcgatcgtctgtggtgaactactggaggccgccggagtgggggctggagccggtgccgcacgattaaacgcacgctggtaaagggcaaaaagatcatcagtagcctgtgctagttccggggcattatgtgactgccagcattgcgccagtttcgccagttcacctagcagcgcatcgcgctgcgctgtggcggcgttctgtgaaaaagcgtcaatacctgtttcgaagcgtttaataacctggctggcaaagcgttttttatgtgccatattctgcggcgcggctaccgcccagtaatgctccacatacagcgccagcaggcgcaaggccaggagcggatcaccggcatgttgcagggttctcagcagatgcgccagcaggcgaaaatccttactctccgaagccagaaggaccagtccccggtgctggagttcagggatatccagctggctgtgcgccagcgatcccagtttgacaatcccaccgtcgatatactcccagtccgggttgtcgtccttcagcgccgatgccagtttctcttccggcaggttttccagcaggtgcgatacccagacattcggatcgcgtaagtccattgccatatttttattctcccgcccagtggcaggcatcgcgcaggggagcaatcgcccttgccagcccgtcaatgttaaaggtcagctttccggcggcgttgtctgcgccggtatccaccatcagcgtttttgcgccgaacagttgcttaatttcatcaatcccggacagccccggctggattccagcagagtgccgttctcgcgcacaaaccagtggctgcgcaatgcccggctgtcggcattcagggtgacggcgatatcatgaacatccagagggtgcatcagcgccacctgcatccgggtgatattgtccacgcaactgaacatcagcaccgggcgcggcggaacatggccgatagccggggtggttatcaccaccgtcgggcgttcccccggcacctgcgtcaccagcagctctgtggtgttgccctggcggcgtttttcctgctccgtagcgcgggtccaggcttcgcccacaaagctggctttgaccagtgccccgttaaatcctgacggggacagtggtgccagcaggcggtcgtaacagtcaagccgctccagcgccgccgtctcctgccgacaggactgcatggcatgtaacgtggcagtcgcatccggcggggtcgcagtggcgacggctacctccacaccggccagtgacgatgtttctgcgggcgcggcactggcgggtaagcccgccaccaggcctgcgataaaccatcctgtctgccggaaaacgcgcaacctgctcataaatccgtttcatcctctgtgacagactcgtcgtccagagcatcttccacgtctgccgtgaacgcgccgtctgccgccgacaggcggatgcgggcaatcgccgtgttggccgccattttctgcaacagcagcagcgagagcgggggcagcatgtcgccgtcaatgacggactccagcatccttgcgccgttttccgcgcgggtgacgcggctcatgatctcgtccgtcacttccgactcaataatcacgtccgcatcaaagcggctgcgcagcacgttatccaggcgggccagtttcccgtcgataatggtggtgagcgtctctttcgacagaggcaggtacggcaccacttccatacgcgccagcagggctggtttaaagaagtccgccagcaccggatacagcacttcctgcatggtttccgggtcatccgcgtgttcaacaatcacctggtaaccaaggttggaggtgaggaagaaaacgatattcttacagtcaatcagtcggccttcgccgtctgccatctcgcccttgtcgaacgcctggtagaacaggttgaggacatccgggtgcgctttttccacttcatcaagcagcaccaccgagtacggtttctggcgaatcgcttcggtcagtacgccgccttcgccatagccgacatagcccggaggggagccaatcagccgcgagacggtgtgtttttcctggaactcggacatattgatggtggtcaggtactggcgaccgccgtagagcagttctgccagttgcaggacggtttcggttttacccacgccgctgggaccggccagcagaaacgcgccgagtgggcgtcccggacgacgcaggtcggcgcgtgcagtcagcaggtgtttatgcaggctggcaatcgccaggtcctggcctttgatggtgtcacccagccataccggcaggtcggtgatgaccgacatctcattctgtgacaggcggttaagcggtacgccggtccattcggcaatcaccgccgcaatctgttttttatcgacgtgcggggagaccagcaaccggtcgttatgcagggcgtccagttcggcagtgagctgtgccagtcgctgcaccggggaaactgtttctgcggtctcttccggctgttcgctgccagcttcatcagccagtttagcaccggtattatcctgttctgactctggctgcgtatcctccacggtatctgcgtccggcaacggcgccgcatcgtcctctgccacgcccagtaactgctggcgcagcgcaataatctcccggaccagcgtctgctgctggtgccaggccgcttccagttcatccagcgccgtcagcgtttcatcatactgcaccagcacctcggtcatccgtgatgtgtcggtacgcagtccgatgcgaagctcgcgctcaagctggcgaatttccgcctcctgctggtggctcagagtggtcagcgccgagatttgcttcggcggcgacgacaggttgatggccacacgggcgcaggcggtatccagcacatcaatcgctttgtccggtaactgacgcccggagagataacgctcgcttaatgtcgcagcggcctgcaaggcgtcatcatcaatcagcacgccgtgagactgttcatagaccgccgacagaccgcgcagaataatggtggcttcggcagcgttgggttcgctgaccttcaccaactggaagcggcgcgacagggcggcatctttttcgaagtattttttgtactcgctccaggtggtggcggcgatggttttcagctcgccgcgcgccagcgccggtttgagcaggttggagatatccagcccgccctgctggttgcccgcgccaatcagggtatgtgcttcgtcgataaacagaatgaccggcaccggggaggaaatgacctccgccatcagccctttgaaacgtttttcgaattcacccttcaccgacgccccggcctgcaatgcgcccaagtcaagggtcatgatatcggtgtttttcagcttgtccggcacctggcctgccacgatgcgcagcgccagcccttcaatcagtgcgcttttgcccacgcccgcttcgcccaccaccaccgggttgtttttacggcggcggcagagaatgtcgatcatcaggtcgatttcgtggtcgcggcacagtaccgggtcaagcctgccgttacgggcgtctgcggtcatgtttttggcatagcgggcaagcagggtgtcagaggcgtccgtcattgtgcctgcgcctttaccgtctgcatccggcacgactgattccgccgactcctgtgtccactgcacaaagtcctgttgcagacggtcacggttaatgccggtcaacagccgggcggcagcaggcggtatataacgcagcggcgaatgcagcagggccagcagcaacacgccgccgcgcagttcgctgtgctgcatctcagccgacgccagcagccagccctctttaagccactcaaccagcatcggggaaaacgccgggtagctgtccgcagaacgggcggttgtgtagttctctaccgtcagcgcctggcgcaactcttccatgccaatatcgccctggcgggtaataacccgcaggtcactgcgtggcatggcgagcatctgaatgagcacatggctgacggtaatttccgctgcctgctgactcatacattcagaggcggccatctccagcgcctggcgggagaacaggttcagccgttttaccagcgtgggaagatcaatctggatcataaacgtccttatcgaagtaatttgtttagctggtgcaggatgtcctgcgtctggctgtccagccgcaacagatagaacaggtaaaacaacgccagcacgacaacgccaccacaaaaaatatgtttaacagtcaggcgactgatgagctgataacgcccgccctgggtttttttgtcctggtgtaacagcgggaaaggggcatcgccgcgcagtttatgctgaacgtggtacagacggcggtagatctgctcaaattccccctgatcctgtgctgccactttgtagcgcccgcgaaatcccagagaaaaacagatccagagaaattccagcagatcctggtaacgtttgggttcacggatcaggcgctccagcaggatgaaaactttctctccaccccaggcttcgttgtggaaatggaccagcaatgactgcttgatccactcgttcttgtttgaccagccgttaccgagcgccgcttcatcaataaacgtgcagaggatgtagcgaaacgagataatcacgcccggttcgtagccctgctcctgaagcagttgctccacggcctgaacatccgtcaccacctgagcaaaaagatgctccggcatcgtctggctgttcatggttgaaaggcgcattaccataccgagtagcggcgtggccgcgtcgatcatcggattcaggctgttgccacgaagcgcgagatggtagttgcgctggcttttttcgtcgtatccggtaaatggtggcagagacagtgacccctcatccatcgtcttaccctcttatcgcccacagttgcatgttcagatccgggaaactgccggatacatgcagtgcaacggccccggcggcagccatttctgtccaggcctgtccgctcttgtcgagttcgaaatagctgaacccggaatggtaaggaagctggcggggagccaccatcagtgcgcgcaatggaatgccggggatctgcacactgaccatattgcggattttttccggcgaggaaattttcgactgctggataaactggcgctggatctgatcgaccggcatgtttgccgccacggccagcacaaaggtggcagattgcagcagttctgtgtcatggatatcggcctgccagataccgtcacgcagatgcagcggcagattgacggctcttggcgacagtacggtatgcagcgcccgtttgacttccggtaacagcgttttaaatgttttggtcaggtcatgatgatcatacacatcaagcgggcagggcaggcgcgacggctcggtaaaggtcatcagttcacccagcaacccggcaagatcaaggtagaaatcttccgggtggagctgggatcgacgggcgtgatgggtaaaccgggtctggttacggttaagtaactgcaacatcataaattccgccacatccgcgatgccgctctgcgccggagagccaatgcggtttgccagatcgcttgcccgtccgccaatggccccctgtacctctttgagataaacacgcagtttcttactgacctgaatattctggcaggaggggataaaatcgtcatccagcgtcagggagccgtcggcatggcgatcgctgatacggcaaagcgggagcgtaatataggcgctcatatcttctgcaccgctcataatgcgcggcgtcagttgtcccagcgtcagtgttcgcgtgtcaccttcttctgaatgcaaatcccggacatcggcataattcagccggtaacgcccgattcgccgcccgtcgctgatttcatttctcacatcactggcgaccggcagagcgaggtagatattgcggcttctctcgtccggaaaatgttgcgggtgcagcggatcgggcagtgcgtcctggtcggggatagaaaagacggtgccgtcgggcagtgtgcctgacgcgctgtcaatcatgatcttaccctgtgccagcagttcattgttgagagtgagttcggtaaatccccaggataaatcattcatggcccggaaacgctggttatccaggtagtcgttgtaacgctgctgctgctggaaatggtgtggacgcatcagcatcccttcctgccacatcaccttgttgcgggtggttgccataattattcatcctcttttttcatttcgatgctgctttgacgtacatgcaccagcaggcggtaatggtggccggttccttccaccgtctcgatttgtttccattcagtggcctggtcatcggagaaataggccacgacaccaataaactgcgttttctcatccagctttaccggcggcagggttttgatggtgtccggcaacaggttgaaatcctggtggtcgatatagtttttacccagcacatccggtagcggcgtactggctatctggtcatagtcggctgccagcaattttgagtcgtcagtcaggtacaccagttgcacatccacggcggctgattcaccttccgcattggtattggtgtccggttcggtcagcagggtgacggttatttccgaaggttgctccttcaggctcccgacctggatatccgggtttttgatcacctcactgatttttttcgccgtttcgcagccggttaatatgacgcacatcagcacgcaggccagaaacgccttcctgttcatgcttccggctcccgctgtttttcacgaagcacccggtcatagacctgggcgtagacctcgttaaacagcatctcaaacccctgctggcgatcggaggccagttcttcgtaataatggctgtacatttgccatgctccggcatcatccagcggctggcgcagttcatggctgcggcggtactgcacaaagcggcgcagcagattttgtggtgagaaagcatccagcaggacacgaagcgactccacaatcgctgcccggttagcttcttcgtggtggcggacattgcgcaggctttcactgacggcggcgggagccgccaaatgtaccgggcttttaccttcggcaaacattacgtcgagcgcggtggcgtaatccatgttcaggcgcagcgggttatcttccagcgggcgcaaatgtttgtctgagaggctgttacgctgctgctgcaaatcgagcagaccttttattgcggcctgtaacgttcgtccggcctcctccagaaaatcatccgcatcgtcggaattgctcatggtaagcgagccgccaagaccgcgcagtaagggggtgaccgcaaggtggcgttgcgccatttctgccgcagagacgtcgtcattacgatcgccggggctggcataaatgggcggcagatccataaacggagtattgatccccccattacttgccggatcggacagcggtgccgatggccggacagccgcaatgcctgaaagcggatcgcccgtggtaatcaggctttcggactgaagtgcctggagtggatcggcagaaaaaccgtttaccacggtgtctgcaagttggtgccggtgagtcattcccggatagtgtggcgtaccctccgttgatagcagggtatccgtgagcatatcgcgattggtaacgatggtttcgggagtggccatttcctcatcgtaatggggaatatctccccggttcagatgaaccctcaccatcagccgtccgatctggatctcatcgccctggcgcaactgtattaggtctgatgttgctgtgacttttgcctgattcagccacagttgtgccgtctgcgggcgcagacaaaatgtgccatcgtgcaggataacggtaaaagcctgggccggaatgctctgctgacgatcctgtaccgaccagtggcattcggggccatggccgacatttccctgctgtgtgaacagacagcgcgccgcccgtccgctttccagctcactgccgttaatgacctgcaatgaaagcgtctgtagtttctcttccggcatattctgctccgtgattatcataatttacgaccgtaccctgatggtgactgagggtcgttcttccggtgtgccgaggaagctggtccagcccagcagcgcacttttgttatcgcccaggcgcattgcgcccacctgctccggcgccagccccagatgtaagtcccaggcaagctgatcgcgcaggatgaaggacacgaacatcgtcagtggcaggaagttttcgccggacggcagaaaagagaggaactgttttcgggtcaggctggtaatactgagctggaattttccgctgagatcgggcactcgtgtacccagaacaaagttgcccagtaccgatcttcccgccagtttttcgccatttttaagagaatagctccccagactattttgctgatccggttcaatatccaccttgcgacgttgccagttttgcagcgtcacttctgacaaatcaaagcagtgggacaccaggccacagattatttccggggatcgtcccggatttgccaggataccggaatacgccagcattttgctgtgattaatcgccagcttatcgcgaagctggcggtggcccagcccgacaagggagtacatgcgctgcgagaacgcatccacaccgccgttacgaaaactgatgtgatagcggtacttacgccagatatgccagacaaactgggtcaggcggtggctgaacatatccagaaaatcacctaccggactttgttcatgtaccgctttccaggccaggtgatcgaggtaataaccggggagaggcgactggctcccctgtaaccccataaaggtggtggtcatcctgaatgcccctgatgtatcccgtttcagcgcactgatatcactgcacgggaaggcaaagctggcatcggcgctgaaacgcagggtttcctgtgccggatcgtcacgcagggataattctggcgtccccttttcaccctttgccaggcggtgcaacagctccgccatcgcaaaaaattgtaagagcaggcattatggaaaacctgtgccagcggatcattctgctctttatctgccgggggatttcccggactcagataagaggatgctgcccgattctttccgtccatttccatgtctcctggctttctgtgttcacaacggtcagcatgtggaatgagttaacgctggcgtacagcgacagaaaatgcgaaagcaccgtaccgagcagatacatttccccttcacagacaaacggctccgggtgcagatacagcgtggaggccagtccccggacgggaatacccgtaaacaggcgatcaacggggcgggtctccagacgctcaatggcatccagcttttgttgtgacagccgtgccgtctgcggatgatggattgcgtggcgatcaaagttggcgatgacctgcttcagcgcgtccgtatccagtaatgacagataattcaggttcatggcggagagtagggaccagtgcaggctgccatcaatgaccggccagagtggttgcgtcgggcgggtaatgttgcgaaatgaagcaacagctgcatttttaccggttgtgccggtgatatcgccggaacgaatttgtgacggaagctcacggttggtacaggtcagcgataccgaaaccacttcattactgagcagagattcgtctgacggataactgccatcagcatgtataaaggcaagggtatgatcaaagccgctatggaacagggatgttttggtccggtgatgccagtacaccacttcccgcttccggctgtattccatctgatggctgaaactttcaaaggctggccactggcgcgcggcctgcgtcgaaacaggacgccccagatcttttttcctgaacatatcctggacctggctcaccacactgttaacggaaaatacatcgtaatgttgtgggtaatggcggctgggaaccagcggatagtctgcccgccggttgtccagcgtgatggcttctgcatggtggataaataaattaatggcaggtgcgcaatacaggcgcagggaatcgcggcgcagccggatgtccacgggcaaagggcgcgaaaaacgcagttgcagggtaaagaattccgcctgcaatccgtcaggcaaagccggacaaccacaaagatcaaaaaagagaaacgcatcggggtaacagaaatactcctgaaggatccggtagccgctgtggacgtttttcggccagggcagcatggcatcctgcggctcaaaaccgacagcttttagcataaactcaggcaggcgaagatgctgttcacccacagtcaggtcggcaccctgcaagtattcgcagaaccataaataaagctggtcacgggtatagttgtcgtcattgccgagccagaagcgaagtttgttcagatccagcgtgcggaagtccgttcccggtgcgaccgaaaaggtgatgttgataacaccattacgggtcgtactgcggttttcaatctgctccaggcgaacgggcagcagccagatatcccggcagagggtgaaggtacagggaggcggctcctcctttttagcatcagagggcagcacttcatcaactctgatttccccggcgttggttgtaaactgctcattacgggggattaacaccggtacagaagacttatccatatccggcgtatattcaataagggtcattgccggaaccggacgcaggtaattaggccatagcatcttaataagcccgtgcgtcagttctgggaattcatcctcaattttctggcggagattgccggtaagaaaagccaccccttccagcaggcgttcaatatccggatccgcatctttttcggccaggaagcgggccagatggggtttttccgttgccagcagcttgctaagctggcgcaggtaatcgagttcttcccggaaatagcgttcttcaaattccatttgtcagtccacccggtaatgctggctgccattcggtgccatatcaaattcaagcacctcatgcgtttcgttaaatgtcacccaggctgtaatatgaaacgtcatatccagcgggctggaggcggatgaaaccactgcctgcacttcagcgtgtgagatccggggttcatagcgttctatacattgctcgatggcccgactcatggattcgcggaagttttcagccccttccggttcatcaatgcccagctcaggcgcaccccggcaactaccggaccgggtattaagaatgtttcgtaggttctggcgaatggattgcctgagcgaataaatactgcctccctgccggtttctggccgaagaggcttccatacgctcaaaaagagaacctgtggttctttcccgatccggtatcatggtgtgttactccctgtctaaccggccaaccagggaaagctcaaaatttgcccccataaatttaaaatgaggtctcacgcttagcgcaacctggtaccagccgggttcgccttctacatccataacctcaactttggcagcgcgcagaggtttgcggctgcgcacgtctgcaggcgggttttcctggtcggcaacatactgacggatccaggtattaagctctctttctaagtcgctcctttctttccatgaccccagttgttcacgctgcaacaccttgatgtagtgcgctaaccgattgatgatgaagagataaggaagctgcgtacccagcttatagttggtttctgcatcttttcccggaaagtgcttcggtttttgtaccgagtttgcagagaaaaaggctgcattatcagagtctttacgcatggtaagggtgataaaaccctcttcagccagttcaaattcgcggcgatcggtgaccagcacctcggttgggattttggcctgaatctgccccatcgtttcgaacagatgcaccggcagatctttcactgcgccgccgctttgcggaccgataatgtttggacaccagcggtatttggcaaaactgtctgcgatattgcatgccagcatccaggccgtattaccccacagataatcttcgtggttctggctgacatcttcgtaatagttaaagttcttaacagggttatctgttggtgaatagggctggcgaagcaggaagcggggtgccgtaagccctaaatagcgcgaatcttccgagtcacgcagggcgcgccatttggtgtaggccggaccttcaaagatggcataaagatctttgatattaggcagttcggtccacgagttcagccccataaactccggggaaacggaggacaggaacggtgcgtgcgccattgcgcccacggcactgacgtattgcagcagtttcatgtcaggcgcggtatttttgaactcataagcgcccagcacggcagcgatgggttcaccgccaaactgtccgaaaccggacgaataaacgtgcttataaaatccggactgaataatttctggcgcaaactcaaagtcttccagaagttcctgcttggtgacatgaagcacgttgaccttgatgttttcacggaaatcaacgcgatccaccatggttttcagtgagcgccagaacgactcgacctgctgaaaggcaggcgcatggatgatgacatccatctggcggctgatgcgttcatcaatatctgcaatcatgctgtccacggccagtttattgaccggttcggcagatgcagtggattgcaggatgctggcaataaaggctgtcacaccctggcgggcaacgtcataaccttccgaaccgggctgaatacgggtctgtgccatgatttgatcaagcagcgacgatgcctgctcaggctgcccggcatgactggatacgagttcctcttcctgtaaagacatactgaaaatccttctgttttagctgtgtttctgaaaccggcttttcgccgtcagtgaagtacgcgctgccagtgcgacgcgctctgctgaaactcacaaaaatggataatctcatccaatagatcactgatacggcgatccagtgttgtaatcagcgcagccacaccatcctggttgatttcaacggacgggctgaaacatacctggtaaaccacctgcagaatgtctgcaacagagaggtggtatgtcccggagatatttttgtgtgccgtcatgcctggataaccctgtttaatgaaatagtggtggttatttattgctcaccagaccgatttctttgagcaactgctcgcgggactcttcattttccagcaatgcctggagctgggtacggaatgccggaaggttacccatcggccccttcagtgcagtcagtgcttcacgcagttccagcaatttattcacttccggaacctgccgggccacgctatctggtgaaaaatcatccagtgatttgatattcagcgccacattcagttcatcgtctgttgtgcttcccttcagcgtggcggggacagtaaaattgaggccaatggctgcttcagccatcactgcaccgaaattgtgcttgttaacggaaactgcctgacgttcatccagtggggatgtttcctgcgtatttccggtatcgccgacaacgagcatgttaagcggaagttccacttcagccgtctggccatctgtttttgggacatacgatatattaatacgctcgcgaggcgcgacgctgccttcaaattttttgctcataaaagtgatccgtcatgttatctcgtacaggccatgaacacggcatatttgtaccgcaaaaaaatatcggcaatgccgccctaatggcggtgaaaataaaatcaccactccttcatcaccccgcattttacgcttcaaaataaataagaaaaggactttttatcgatcgtaaagaggggtattctgcaagcgttaaatagattgtgtgaacctgtgcaattcgcgtcaggtgtattatggcaataatttaaatatagattttttatgtaacttattgaagtatataataatttcattaaacataagctaatctaatgattgcttntttatatatttgttttgtgattgattaagtgggtatttttaaggaatatctcaaaaattatcaaaatgataattcagaaaggataaatacaatatttattcatgattcagctttggccattttatggaggcaatacggactttgaacagttgggtatggttatccagatatatattattaagttattgctgaataagagatttaatgattttaaaaatagtttttacgacaaccgtaaattctagctcggtttgtatgtaaaaaatactgaaaaatgatgcggttccgtgaagtgagctgcatctgcctgtctgggattaacggcaggtcattgtaagtagtaattaaccacgttaacaaggagtttacaaatgccaacaccgtgttatatctccatcactggtcagacccagggaaatattactgcaggtgcatttaccgctgattctgtcggcaacatctatgtgcaggggcacgaagacgagatgctggtgcaggaattcctgcataacgttactgtcccgaccgatcctcagtccggtcagcctgcgggtcagcgtgctcacaagcctttcatttttaccgtggcgctgaacaaagcggttccgctgatgtacaacgcactggcctccggcgaaatgctgccaaccactgaacttcactggtggcgtacctctgtggaaggcaaacaggagcattatttcactacccgcctgactgattcgacgattgtcgatatgaaactgcatatgccgcattgccaggacccggcgaaacgcgagttcacccagttgctcgaagtttcactggcctaccgcaaaattgaatgggaacacgtcaaatctggcacctccggtgccgacgactggcgcgcaccgctggaagcataagttaagccaacagcatccggctatcaggccggatgctgtttttgtattacgccgtagaaagaaaggttgtcagtaaggggttacgttcacgggagatggcggctgccggaaacttcggcggtagcgtgcctgaacgcaagcgtaacactgtactgtcacagccgctttaacagcgaactgtctgtttttccttaaccccggaggttgctatgtcaaccggattacgtttcacgctggaagtggacggcctgccaccggatgcttttgcggtggtctcctttcatctgaaccagtcactctcttcgcttttttccctcgatctctctctggtcagccagcagtttctctcccttgaattccagcagatcctcgacaaaatggcctacctgacgatatggcagggcgatgacgtacagcgccgggtgaaaggtatggtgacctggtttgaactgggggagaacgacaaaaaccagatgctgtacagcatgaaggtgtgcccaccgctgtggcgcacagggctgcgccagaacttccgtatcttccagaatgaggacatcgaaagcatcctcggcacgatattgcaggaaaacggggtgaccgagtggagcccgctgttcagcgagccacatccttcccgtgagttttgtgtccagtacggtgagactgattacgatttcctgtgccggatggcggcggaggaaggcatcttcttttatgaggagcacgcgcaaaaaagtaccgaccagagcctggtcctgtgcgataccgtgcgttatctgccggagtcctttgagatcccctggaatccgaacacccgtaccgaggtgagcaccctctgcatcagccagtttcgctacagcgcacaaatccgcccttcttccgtggtgaccaaagactacacctttaaacgccccggctgggccggacgttttgatcaggaaggccagcaccaggattaccagcgcacacagtatgaagtgtatgactaccccggacgtttcaagggggcccacgggcagaactttgcccgctggcagatggacggctggcgaaacaatgcagaaaccgcgcggggaatgagtcgctcgccggagatatggccgggacgacgaattgtgctgacggggcatccgcaggcgaacctgaaccgggaatggcaggtggtggcaagtgaactgcacggcgaacagccacaggcggtgccaggacggcagggagcggggacggcgctggagaaccattttgcggtgatcccggcagacagaacatggcgaccacagccgttgctgaaaccgctggtggacggcccgcagagcgccgtcgtgacgggaccggcaggcgaggaaatcttctgtgatgaacatggccgcgtgcgggtgaaatttaactgggaccgttataacccgtcaaaccaggacagttcatgctggatccgtgtggcacaggcgtgggcaggcaccggattcggtaacctggcgataccgcgtgtgggtcaggaggtgattgtggacttcctcaacggcgatccggaccagccgatcattatggggcgcacctaccaccaggaaaaccgcacacccggcagcctgccgggaacaaagacgcagatgaccattcgttcgaaaacctataagggcagcgggtttaatgaactgaagtttgacgatgcgacagggaaagaacaggtctacatccacgcgcagaagaacatgaacaccgaggtgctgaataaccgcaccactgatgtgataaacaaccatgccgaaaaaataggtaacaaccaggcgatcaccgttaccaataaccagatccagaacattggcgttaatcagatacagacggttggtgtcaaccaggtggaaacggtgggcagtaaccagattatcaaagtgggatcaaaccaggttgaaaaggtggggatcattcgtgcgctgacggtgggtgtagcttaccagacgacggtaggcggcattatgaatacctcggtggcgttgttgcagtcctcacaggtagggctgcataaatcactgatggtgggaatgggctacagcgtcaatgtggggaataacgtcaccttctcggtgggcaagacgatgaaggaaaacaccggacaaacagcagtttattctgccggtgagcatcttgaactctgctgtggtaaggcaaggctggtgctgacgaaggacggaagcatatttctcaacggtacgcacattcatctggaaggggagtcggatgtgaacggtgatgcgccagtgattaactggaactgtggtgccacacaacctgtaccggatgcgcctgtgccgaaagatttaccccccggaatgccggatatgcggcaattttgagtcaggtgcaaaaaattaaaacggaactggtgcagtgaccagatgaaccatattaaaagcagaaggaattgatttatgggcggcggaaaaccggcggcgcggcagggtgacatgacccgcaagggactggatattgtgcagggttcagcaggggtgctgataggtgcgccaaccggtgtggcctgctcggtgtgtcccacaaaaaaggacagtccgaactatggcagcccggtgaacccgctactcggtgcgaaggttctgcctgttgaaaccgacctggcactgcccggcccgctgccgtttattcttttccgcgcctacagcagctaccggaccaggacgcccgcgccagtgggcgtgtttggtcccggctggaaagcgcccttcgatatccgcttacagatacgcgatgaaggcctgatactcaacgacagcggtggtaggagcattcactttgagccgttgtttcccggcgagataagctacagccgcagcgagtcgttctggctggcaaggggcggagtgctgaaacaacacaaaggccatccgcttgcgcggctctggcgggcgttgccggaagcggtccgtctgagtccacacacctatatgatggctgtcagcacaaccgggcagtggctgatactcggctggccggagcgtgtgccggaggcggacgaggtgccgccgccggagccgcccgcataccgggtgctgacgggcgtggtggacggcttcgggcgctcactgattttccaccgcgaggccgcaggcgagctggctggcgaaatcaccggggtgacggacggcgcgggccgccgttttcacctggcactgagcacacaggcgcagcgggcggaagccttccgtaaacagcgcgtcacgtctttatcctcccctgccggtccccgttctgtttcctcttctcaggttttccccgacacgctgcccgccggtacagagtacggtgccgataacggtatccggctggaggcggtgtggctgacacacgacccggcctacccggatgaacagccgactgcgccgctggcgcgctacacgtacacggccagcggagaactgcgggcggtgtatgaccgcagcgggacgcaggttcgcgggtttacttatgatgcggagcacgccgggcggatggtggcacaccattatgcggggaggccggagagccgctaccggtatgatgataccggtcgggtgacggagcaggtcaacccggaggggctggactaccgctttgagtacggagagagccgggtaatcatcacggacagcctgaaccggcgggaggtgctgtacacggaaggcgagggtggcctgaagcgggtggtgaagaaggagcatgccgacgggagcatcacccgcagcgagtatgatgaggcggggaggctgaaggcgcagacggatgcggcggggcggcggacggagtaccggctgcatatggcgtctggaaagctgacttcagtgatactgccggacggcaggacggtgcggtatggctataacagccagttgcaactgacttcagtgacatatccggatggtttacgcagcagccggaaatatgaccgtcagggccgactggcagaagagatctcgcgcaacggtaacattacgcgctggttttatgattcttcccgcagtggcctgccctgtgcggtggaagacggaaccggggtgaggcggagaataacgcgaaaccggtacggtcagcttcaggcctttacggactgctcggggtacgcgacgcggtatgaatatgaccggtacggtcaacaaatcgccattcaccgggaagaaggcatcagcacttacagcagttataatccgcgtggccaactggtcagtcagaaggatgcgcaggggcgtgaaacccgttatgagtacagcgccgcaggcgacctgacagcgacgatatcaccggacggtaaacgcagcaccatcgaatatgataaacgcgggcgtccggtgagtgtgacggaaggcggactgacgcgcagcatggggtatgacgccgccgggcgcatcaccacgctgactaatgagaacggcagccagtccacgttcctgtatgacccggtggacaggctgacggagcagcgcggctttgatggcaggacgcaacgttaccagtatgacctgaccggaaaactcacgcagagtgaagatgaggggcttatcaccctctggcattacgatgcgtcggaccgtatcacccggcgcacggtgaacggtgaaccggcggagcagtggcagtatgacgaccacggctggctgacagaaatcagccacctgagtgaaggccaccgtgtggcggtccactacggctatgacgataaaggccgtctgacgggcgaacggcagactgacggagaagacggaccgcatcccgacgggtgtgatacggacggacgacgagcggacccaccactaccactacgacagccagcaccgcctggtgttccacacgcggatacagcatggcgagccactggtcgagagccgctacctctacgacccgctgggacggcgaatggcgaaacgggtatggcggcgggagcgtgacctgacggggtggatgtcgctgtcgcgtaaaccggaggagacatggtacggctgggacggcgacaggctgacgacggtacagaccgacaccacgcgtatccagacggtataccagccggggagcttcgcgccgctcatccgcatcgaaacagacaacggtgaacgggagaaagcgcagtgccgcagcctggcggagaagatacagcaggaagggagcgaggacgggcacggcgtggtatttccggctgaactggtggggctgctggacaggctggagggggaaatccgggcaaactgcgtgagcagtgaaagccgccagtggcttgcgcagtgcgggctgacggtggagcggctggcggcacagatagagccggtttatttgcctgagcgaaaaatacatctttatcactgtgaccaccggggcctgccgctggcgcttatcagtgaagacggcaatacggcgtggagcgcggaatatgatgaatggggcaaccagcttaatgaggagaacccgcatcacctgcaccagccgtaccggctgccggggcagcagtatgataaggagtcggggctgtactataaccgtcaccggtactacgatccgttgcaggggcggtatatcaccccggacccgattgggttgagaggtggatggaatatgtatcagtatccgttgaatcccatacaagtgatagacccaatggggttagatgcgattgagaatatgacatcaggtggactaatttatgccgtatctggtgtacctggattgattgctgcaaacagcattactaacagtgcttaccagttcggttatgatatggatgctattgttggcggagctcataatggggccgccgatgcaatgagacattgttacttgatgtgtcgaatgactaagacatttggatcaacaatagctgacgtgataggtaaaaatcatgaggcggcagggatagacaaggtcagccagctaaagaaagaatcatggatcttaaaaataacactgtcggtattgcttgtggcgatttttctgccaaatgtagcgatgcatgtattgaaaaatataacactgggcaactcttcgggttagatggtataaaagcagataatccaataaaagcaaagcaagggagttcagatgcttcaaattattagaggcaaacttgtcatttttttaattaccctttgtttatttgttgtttaccttgggtttgataacaattcaaattctgacatcgtattttatggacataaaacaccaaagagcgttgagatatatctttctgaaaaaaatattatttataaaataattaatgaccaaaaaattagtagagggaatggtcattttataagtataatggttaataattacaggacgcactgtggagtggttgatataaatcttaattttttcaatgatattctttatagcgtgcgattaaaaaacattagtaaactggagaatatggagttctgcgctaaaaaacaacgggtgtattttagtgataaaaacaagaaggctagttataaaataattaattatggagactattacgatgttgattattatgataacaatttgaaaaatgaagtttttgactggattggtaaatggtcataatgaacaacaccagaaagagaaaaatataaaatacatacagaaagacatgagagcaagggacggggcagggcaagatcatgaaaattgtgatgtaaatcacgattttcatcttggctttaacgcctacaggtgatcaaaatttaacctttggaataactaaaaagataaaaaaggacccaggtgagtattcaaagtttgcttgattatatttcagtgatccctgatatacgacaacaaggaaaggttaaacataaattatctgctattttgtttctcaccgtatgtgcagtaattgcaggtgccgatgagtggcaggaaattgaagattttggacatgaaagacttgaatggctaaagaaatatggtgattttgataatggcattccggtcgatgacaccattgcacgcgttgtgagtaacattgacagtttggcctttgaaaagatgtttattgaatggatgcaggagtgccatgaaatcactgatggtgaaattatagcaatagatggaaagaccataagaggctcctttgataagggaaaaagaaaaggagcaatccatatggtgagtgcattctcgaacgaaaatggtgttgtactggggcaggtgaaaacggaagccaaaagtaatgagattacagccattccagagttgcttaacctactgtatttaaagaaaaatttgataaccattgatgctgtgggctgtcagaaagatatcgcttcgaagatcaaagataaaaaagcagattatcttctggcagtaaaaggcaatcaggggaaattacatcatgcattcgaggaaaaatttcctgtaaatgtgttttctaattataaaggcgattcgtttagtacgcaggagataagtcatggaagaaaagaaacacgtttgcatattgtcagtaacgtaacgcctgaacttttgtgattttgaattcgaatggaagggattaaaaaagctttgtgtagcattgtcattcaggcagaagaaagaagataaatcagcagaaggtgtaagcatccgatattatatttcatcaaaggatatggatgctaaagaatttgcacatgctatcagagcgcactggctgatcgagcacagtcttcattgggtgttagatgtaaaaatgaatgaagatgccagccggataagaagaggaaacgcagcctaaataatatctggaataaagaagatggcactgaatttattaagagattgcaaagacattaagggtgaagaggaaaagaaagaaggctgcgttaaacacagggaaagatcatcagaagttcactttttgtactaaataattcgcattttatgtttaaaaattgagatattcctcattacctgaagctgttttttattgcttatacatgatcaaatactccttacataaataaggtgaacaaatggaacttaaaaaattgatggaacatatttctattattcccgattacagataagcctggaaagtagagcataaattgtcaggcatcctactattgactatttttgccgttatttctggtgcagaaagttgggaagatatagaggatttcggggaaacacatctcgatttcttgaagcaatatggtgattttgaaaatggtattcctgttcacgatactattgccagagttgtatcctgtatcagtcctgcaaaatttcatgagtgctttattaactggatgcgtgactgccattcatcaaatgataaagacgtcattgcaattgatggaaaacgctccggcactcttatgacaa

SEQ ID NO: 478 - DNA, 94856 bp, Escherichia coli
cgccgtgggttgccagcgctttgttaaacctttgattaagtctgaatccgaacttacggtggacgcaagcataaccgcaaaacccttttttgaacgttatggttttcagacagttaagcagcaacgcgttgaatgtcggggagagtggtttattaatttttatatgcgttataaacagcaacattaaatccagcttgcaatgaaaataacgcaagcctagtatgtgcgcgttttcttattccacaaactgcaaggaggtaaatcatgacaaatcctttatcaatgactctttgcagacctttccaggattaattctttttttcttgccctggattcgtctgccatttcctgattttttaattgttactctcaataattcaagtcgcaacacatgcaacttgaagtatgacgagtctatttacggaatggtatatgggcaattatattcgtcccttatccgatgcggtatttaccatcgcatctgatgacctgtggatcgagagtttagcgatccaacaattacacaccacggcaaatttacccaacatgcagcgcgtagtggggatgccagatttacatcccggacgcggctatccgattggcgcagcgttcttctctgttggtcgtttttatccggcactggtcggcaatgatatcggctgcggtatggcgctatggcaaacagatattctcactcgcaaatacaacgccgataagtttgaaaagcgattatcagatctggatgacgttgctgaagaaagctggctggaggaaaacctgccgtcagcatttgcacagcatccgtggcgcagctcgcttggctctatcggtggcggcaatcatttcgctgaactgcaacaagttgatcaaatcatcaacgctgaactgtttgcactggcaggtctggatgcacaacatctgcaactgttggttcatagcggctcgcggggggtggggcagtctattttacagcggcatattgcctcgttctcgcatcatggtttgcctcaaggcagtgacgacgcgctacggtatattgcggaacatgacgatgcgctggcgtttgcgtgtattaatcgccagatgatcgctttgcgcataatgcaacaagttaaggccacgggaagtccggttctggatgtggcgcataactttgttagcgcgtgtcaaatcggcgatcaacagggctggttgcatcgtaaaggtgccacgccggatgacaacggtctggtgattattcccggttcacgtggtgattactcctggattgtacagcctgttgcgaacgaaaaaacgctccactcgctggcgcatggggcagggcgtaaatgggggcgcaccgagtgtaaagggcgtctggcagcgaaatacacggcgacgcaactctcgcgtactgaacttggcagtcgggtaatttgtcgcgataaacaactcatctttgaagaagcgccacaagcctataaatcggctgaaagcgtggtgcaatgtctggtgcaggccggtttaattattcctgtcgcgcggctgcgtccggtgctaacgctcaaaaacagtggagggaaaaaaggatgatcttgctacaactctcctcagcgcaggggccggaagaatgttgtctcgcagtgaaaaaggcgctggacaggctaattaaagaagctgcccgacaagacgtcgcggtaacggtgttggaaacagaaacgggccgctactctgacacgctgcgttcggcgctgatttctctggatggcgataacgcatgggcattaagcgaaagctggtgtggcactattcagtggatttgtccgagtccgtatcggcctcatcatgggcgcaaaaactggtttctgggcattgggcgttttaccgctgatgagcaggaacaatcggatgcaatccgttatgagacgttgcgttcgtcggggccgggcggtcaacatgtcaataaaaccgactcggcggtacgcgccacgcatttggcatccggtattagcgtgaaggttcagtcagagcgtagtcagcatgctaacaagcggctggcacgattgctgattgcctggaagctggagcagcagcaacaggaaaatagcgcggtgctgaaatcgcagcggcgaatgttccatcaccagattgaacgtggcaacccgagacggacatttacagggatggcttttatcgaaggataatgaaggatgaaactgccggaaggcgattaaacgccatccggcagcaaatcaaataattacttcgccggaatttctttcagcagttcagtcagcagcgtccagtaatgacctacgctttcgatgtgaacttgctcatccggagagtgtggaccggtgatagttggcccgatagaaaccatgtccatttccggatacggttttttgaacagaccacattccaggcccgcgtggataatctggatgttcggtgttttgttgaacagacgctgataggtttcacgtaccagatgcatcaccggagaattagcgtccggctgccagccaggatatgcgcctttcgcttcggttttcgcgccagccagtttacccagcgaatccagcatgctcaccacgtagtctttaccgctgtcgatcagtgaacggatcagacagtgaatttctacgttattatcagtcatggtcaccacaccgacgttcagggaggtttcgaccacaccttttgccacgtctgagttgcggatcacaccgttcggggtggcgttcagcagacgaataaaggtatcgcgagatttcgcaatcagggcagctttatcgttcgctacagagtccagcaacaaggccagatttttctctttctctgccagctcgtttttcaggatctcctgataggtattcatcagagatttcaggacgtcgactttatcagctgcgacagcaatggtcgcaaaggcttcacgcgggatggcgttacgcagtgtgccgccgttgaaatcgataaggcgcagatccagttcttctgcatgacccgccaggaagcgcaccagcagtttgttggcattacccaggccaacgtggatttccccgccggagtgaccccctttcagaccttttaaggttaacttgaaggtttcaaaaccagctggaaccgcttcacgatctaaatgcaggttggaggtgaagtcgataccccccgcacaacccatgtagatttcaccttcttcttcggagtcggtgttaatcagaatatcagcctgcaaccagttgctctgtaagccgaacgcaccgtccataccggcttcttcggtcatggtcagcagcacttccagcgggccgtgaaccacgttttcgtcagccagaactgccagtgcagaggccataccaatgccgttatccgcacccagcgtggtgccgcgcgctttaacccattcgccatcaatataaggctggataggatctttcgtgaagtcatgcacggtgtcgttatttttctgcggcaccatatcgaggtgggcctgtaagacgaccggtttacgattttccatacctgcggtagcaggtttacgaatcaggatattacctacctgatcgcgttcgacatggaaacctttctcttttgcccaaccaacaatgtattcagcgagttgctcttcatgataggacgggtgaggaatagaacagattttggcaaaaatatcccacagcggctgtggagataattgagacagttcagacacgttaagtctccttgtcgatcacccgcaaaacagtattgcaggtcacagggttagcagaaaatgttgtcaacacaagacaggcttgcgagatatgtttgagaataccactttatcccgcgtcagggagaggcagtgcgtaaaaagacgcggactcatgtgaaatactggtttttagtgcgccagatctctataatctcgcgcaacctattttcccctcgaacactttttaagccgtagataaacaggctgggacacttcacatgagcgaaaaatacatcgtcacctgggacatgttgcagatccatgcacgtaaactcgcaagccgactgatgccttctgaacaatggaaaggcattattgccgtaagccgtggcggtctggtaccgggtgcgttactggcgcgtgaactgggtattcgtcatgtcgataccgtttgtatttccagctacgatcacgacaaccagcgcgagcttaaagtgctgaaacgcgcagaaggcgatggcgaaggcttcatcgttattgatgacctggtggataccggtggtactgcggttgcgattcgtgaaatgtatccaaaagcgcactttgtcaccatctttgcaaaaccggctggtcgtccgctggttgatgattatgttgttgatatcccgcaagatacctggatcgaacagccgtgggatatgggcgtcgtattcgtcccgccaatctccggtcgctaatcttttcaacgcctggcactgccgggcgttgttctttttaacttcaggcgggttacaatagtttccagtaagtattctggaggctgcatccatgacacaggcaaacctgagcgaaaccctgttcaaaccccgctttaaacatcctgaaacctcgacgctagtccgccgctttaatcacggcgcacaaccgcctgtgcagtcggctcttgatggtaaaaccatccctcactggtatcgcatgattaaccgtctgatgtggatctggcgcggtattgacccacgtgaaatcctagacgtccaggcacgtattgtgatgagcgatgctgaacgtaccgacgatgatttatacgatactgtgattggctaccgtggtggcaactggatttatgagtgggccacccaggcgatggtgtggcaacaaaaagcctgtgcggaagaagatccgcaactcagtggtcgacactggctgcatgcggctacgttgtacaacattgccgcctatcctcatctgaaaggagatgacctggccgagcaagcgcaggctttatcaaaccgcgcctatgaagaggccgcccagcgtctgccgggcacgatgcggcagatggagtttactgtacccggcggtgcgcccatcaccggctttttgcatatgccgaaaggcgatggcccgttcccgacagtattaatgtgtggtggtctggatgcgatgcagacggactattacagcctgtatgaacgttattttgcgccgcgcggcattgcgatgctgactattgatatgccgtcggtgggcttttcttcaaaatggaagctcacccaggactccagcctgttgcatcagcacgtcttaaaggcgctgcctaacgtaccgtgggtggatcacactcgcgtcgcggcctttggtttccgtttcggcgctaacgttgccgtgcgtctggcataccttgaatcgccgcgtctgaaagcggttgcctgtcttggtccggtagttcataccctgttgagtgattttaagtgccagcaacaggtgccggaaatgtatcttgacgttctggcgagtcgtttggggatgcatgatgcttccgacgaagcgttgcgcgtggagttgaatcgctattcattaaaagtgcaaggattgctgggacgtcgctgcccaacgccaatgttatcaggctactggaagaacgatccgttcagcccggaagaggactcacgcttaatcacctcatcatctgctgacggtaaattattagagatcccatttaacccggtgtatcggaattttgacaaaggtcttcaggaaatcaccgactggatcgaaaaacgtttgtgttaaaaatttgctaaattttaccaatttggtaaaacagttgcatcacaacaggagattgcaatgacgttaccgagtggacacccgaagagcagattgatcaaaaaatttaccgcactaggcccgtatattcgtgaaggtaagtgcgaagataatcgattctttttcgattgtctggctgtatgcgtcaacgtgaaaccggcaccggaagtgcgtgagttctggggctggtggatggagctggaagcgcaggaatcccgttttacctacagctaccagtttggtctgttcgataaagcaggcgactggaagagtgttccggtaaaagatactgaagtggttgaacgactggaacacaccctgcgtgagtttcacgagaagctgcgtgaactgctgacgacgctgaatctgaagctggaaccggcggatgattttcgtgacgagccggtgaagttaacggcgtgagtgaaatgtgccggatgcatcacatccggcaatatctattaaaactgataggtcatgccaaccgcgacaatatcatcattattaatattcaatttgttatcgctatccagttggttgattttataatcaacaaacgctgacatatttttgttgaaataatatgtagccccgacatcgatataattgaccagatcttcatcaccgataccttcaatatctttccctttcgataagacataacccagcgatggacgcagaccaaagtcaaactggtattgagcgaccgcttcaaagttctgtgtcttattggcaaagccgccagttattggcgtcattttgcgtatttcagaataaaaagttgccagataaatattattggcatcgtatttcagacctgtagcccatgcttctgcacgcttgcctgtgccacggctttgcaggttctgctcgttggtgcgatctgagttggtataggccccactaatggcgaaatcgctgccgccaaagtcatatgtcaatgacgtgccgaagccatcgccgttttgctttttaacgtcgcggttttcgtttttcccttgatattgcagggttaagttcaggccatcgataacgccgaagaagtcggtgttccgatacgtcgccagaccgctggcgcgtttggtcataaagttgtcggtctgcgccgaggagtcgccaccaaattccgggaacatatcggtccaggcttccacgtcatacaacgcgcccaggttacggccatagtcgaaagaacccaaatctttatacttcaatccggcaaaagcgagacgcgttttttgctgtgcagtatcactctccgctttatttccggcaaactccgcttcccaacggccatagccagtcagttgatcgttaatttgtgtttcgcctttaaaaccaaaacggatataactctggtcgccatctttactgtcgttatcactcatataatgcatggctttaactttgccatagacatccagtttattaccgtctttgttatatatttctgcggcctgtacggatgcagatgccacaatgcccatcaccactaatgccagagtgctctttttcattttcattcctgattttaattaacgcgcgaatattcagcgggagagccccgttgaaaacaggaaagtttttaacctgagattgttaaagatatattacagattaataatattcttaaaatgtggtaatttattaaatctgtaataaaagcgtaaacaactgccgctaggcttgctgatcccgcgcaacaaaacgccatgctttgcttgcagatggttggcaaccgacgacagtcctgctaaaacgttcgtttgatatcatttttcctaaaattgaatggcagagaatcatgagtgacagccagacgctggtggtaaaactcggcaccagtgtgctaacaggcggatcgcgccgtctgaaccgtgcccatatcgttgaacttgttcgccagtgcgcgcagttacatgccgccgggcatcggattgttattgtgacgtcgggcgcgatcgccgccggacgtgagcacctgggttacccggaactgccagcgactatcgcctcgaaacaactgctggcagcggtagggcagagtcgactgattcaactgtgggaacagctgttttcgatttatggcattcacgtcgggcaaatgctgctgacccgtgctgatatggaagaccgtgaacgcttcctgaacgcccgcgacaccctgcgtgcgttgctcgataacaatatcgttccggtaatcaatgagaacgatgctgtcgctacggcagagattaaagtcggcgataacgataacctttctgcgctggcggcgattctggcgggtgccgataaactgttgctgctgaccgatcaaaaaggtttgtataccgctgacccgcgcagcaatccgcaggcagaactgattaaagatgtttacggcattgatgacgcactgcgcgcgattgccggtgacagcgtttcaggcctcggaactggcggcatgagtaccaaattgcaggccgctgacgtggcttgccgtgcgggtatcgacaccattattgccgcgggcagcaagccgggcgttattggtgatgtgatggaaggcatttccgtcggtacgctgttccatgcccaggcgactccgcttgaaaaccgtaaacgctggattttcggtgcgccgccggcgggtgaaatcacggtagatgaaggggcaactgccgccattcttgaacgcggcagctccctgttgccgaaaggcattaaaagcgtgactggcaatttctcgcgtggtgaagtcatccgcatttgcaacctcgaaggtcgcgatatcgcccacggcgtcagtcgttacaacagcgatgcattacgccgtattgccgggcaccactcgcaagaaattgatgcaatactgggatatgaatacggcccggttgccgttcaccgtgatgacatgattacccgttaaggagcaggctgatgctggaacaaatgggcattgccgcgaagcaagcctcgtataaattagcgcaactctccagccgcgaaaaaaatcgcgtgctggaaaaaatcgccgatgaactggaagcacaaagcgaaatcatcctcaacgctaacgcccaggatgttgctgacgcgcgtgccaatggccttggcgaagcgatgcttgaccgtctggcactgacgcccgcacggctgaaaggcattgccgatgatgtgcgccaggtgtgtaacctcgccgatccggtggggcaggtaatcgatggcagcgtactggacagcggcctgcgtcttgagcgtcgtcgcgtaccgctgggggttattggcgtgatttatgaagcgcgcccgaacgtgacggttgatgtcgcttcgctgtgcctgaaaaccggtaatgcggtgatcctgcgcggtggcaaagaaacgtgtcgcactaacgctgcaacggtggcggtgattcaggacgccctgaaatcctgcggcttaccggcgggtgccgtgcaggcgattgataatcctgaccgtgcgctggtcagtgaaatgctgcgtatggataaatacatcgacatgctgatcccgcgtggtggcgctggtttgcataaactgtgccgtgaacagtcgacaatcccggtgatcacaggtggtataggcgtatgccatatttacgttgatgaaagtgtagagatcgctgaagcattaaaagtgatcgtcaacgcgaaaactcagcgtccgagcacatgtaatacggttgaaacgttgctggtgaataaaaacatcgccgatagcttcctgcccgcattaagcaaacaaatggcggaaagcggcgtgacattacacgcagatgcagctgcgctggcgcagttgcagacaggccctgcgaaggtggtggcggttaaagccgaagagtatgacgatgaatttctgtcattagatttgaacgttaaaatcgtcagcgatcttgacgatgccatcgcccatattcgtgaacacggcacagaacactccgatgcgatcctgacccgcgatatgcgcaacgcccagcgttttgttaacgaagtggattcgtccgctgtttacgttaacgcctctacgcgttttaccgacggcggccagtttggtctgggtgcggaagtggcggtaagcacacaaaaactccacgcgcgtggcccaatggggctggaagcactgaccacttacaagtggatcggcattggtgattacaccattcgtgcgtaaataaaaccgggtgatgcaaaagtagccatttgattcacaaggccattgacgcatcgcccggttagttttaaccttgtccaccgtgattcacgttcgtgaacatgtcctttcagggccgatatagctcagttggtagagcagcgcattcgtaatgcgaaggtcgtaggttcgactcctattatcggcaccattctaatgtctccccaagtctactcaagtatttaaaaacctcttataatccgcatgttagcgccccttttagtcttttgacgtctacttaagtaccccaaaatctacagtcaattgggggtacttttgggggtatttgctgttcagtttagtggaggtacccccaagtgaaactcaatgcccgtcaaatagacactgccaagccaaaagagaaggcttacaagctggctgatggtggtggtctgtatctcttggtaaaacctagtggaggaaaatattggcgcttcaagtatcgtgtagctggtaaagagaagctgttagcactaggtgtgtatcctgaagttactttggctgatgctcgtgcaaaacgtgaagaagctaaaaggggtatcgctgggggtatcgatccgatggaagcgaaacgagaggaaaagattgcccgggaaacgcagttaaacaacaccttcaaagatattgcccttgagtggcacagcagcaaattaaaaaaatggtctgctggttatgcttcagacatcctcgaagccttcaacaaagatgtgttcccttacattggcaaaaaaccaatcgccgaaatcaaaccacttgaactgctgaatgtgctgcggcgcatcgaggggcgcggtgctaccgaaaaagccaaaaaagtgaggcagcgatgcggggaagttttccgctatgcaattgtcactggacgtgctgagtataaccctgcaccggatctcaccagcgcgatgcaaggtcatgaatctaatcattatcctttcctcacagccaaagaattacctgattttttcaaggcattgtccagttactcaggaagtgcattggttgttatggcggctcgtctactgattatcaccggtttgcggactggcgaactgcgcggtgcattatgggatgaaatcgatctcaacaaggctatctgggagatacctgcttcacggatgaaaatgcgtcgccctcatgtggtgcctttgtctaagcaggctctttcgcttattgggcagattaaagaattaactggcaattatccgcttatgtttcccggccgtaatgatccaaggaaaacaatgagcgaggctagcataaaccaagtatttaaacgcatcggctataacggaaaggttactggtcatggattccggcacaccatgagcaccattttgcatgagcagggctataacaccgcgtggatagagacgcagctcgcacacgtcgataaaaactcaattcgtggcacatacaaccatgcgcaatatctggatggacggcgggaaatgcttcagtggtacgccgattatatggattcgctcgagcatggcggaaatgtggtgcatggtgagttcggaaaatgcgggtgactggttgagtatacagtagtagactttgagcgacgaaagaaaaggctgtgtctaggggcgctcccgaaaatccgtacatctcgacggactggtacagccactacagtagaggacgctgaggtgtgcgtatgattgatattcatgccgaattaaacgaatacaaaaaagattttatttctttacgtgaatttcttgaggtcgtgcttaaggtcgctggtgatgattatgatgtttcagatgtcataacttggatactcaggagaataagcggagaacatatccgcctgtacacagtaaatgaatttaagctgttggaatctttttgtaacccgtatcgggatgaatttgattatgatgttctttatagaaatctgaatgcggttcggaaacgtggttgtttacctggtgagagggatgaaaatggttttctggtgtccggttattgggaagatcccgaatttgagaacattggatttataaggggtgaaattttcgcaatttttcccgatgtccttgacgcgttaacgaagctggaaggcgctaactcttctgaaaatgacgaggcacaaggacgcgatattgaaaagaaagagttgcgtacagaggatgatttattatcccaaatcgcaatgctggaaaaagaaaacgcagagttaagggcaaggatagagcagttagagcaagagcgcccgatacacttatataaatactgggataaagacccattagctaaggctattgagattagaaacagagagtgggccaattacgatccagaaaatgattttgccactaggggaaatcaagaagcgataaccagggagcttaagcagtggggggcaagtaatgctcttgcaacgctcatagagaggactgcctgccctattaaccgagacaacagccaaaagaacgcaaagccggattaacgcaccataccgcataccctgagggtgatttactgttaccctgagggtattttttatcttccccgtcaattttaccatcacccttagggttaatttccttccggtaaccattaggcctgagggtatgaaaatattcgttatttctgtgccatgattacctcgtcaaattgagtagacgttatgaggtaaatatatgtcaaatacgcttattcgtttaacagaagttcagcgtagaactggatatagcaaggcatggatttatcgccttatggggcaaggtaaatttcctgcatcagttaaaattggctcgcgagctattgctttcgttgagagtgaaattgacgagtggattaatcagcgtattgctgaatcacgcggaacagctacctgattaaatggctacggggccagaagcccccagctatccaccagcaaataaaagtaacttaattcgatagcaggagtttttatgaaactgcgaaaaacgcccgtacaggggcagggcttcgttcggcctgaaaaccagaatctgcaaaatttcggcgaaattatcccggttatttccggcgttattggcgggcgtgaaaccaatattgttagcggcagagcgttgcataaggcgttaggtgtaggtcgcgttttccgttcgtggatcaaggggcgcattgaagaatacggcttcacggaaggcgtggattatgaggttgttgaatatttgagccgacccgatccggtgagcgcaaaatctcgccagcaaacagctcttgagtacatcattaccgtgaacatggcgaaagaactggcgatggtcgaacgcaccgaacaggggcgcgccgttcgtcagtacttcatcaaatgcgaggaagagctacacaaggttgcgcctgtacgttccgcagcgttacgccgggaactgaaagcccgtatcacagttgccagctactttaagccaatgtgtgccgcgctggaggactaccgggctgaactgggtaaaaacactctacagcaccactacaccacggaagccaatatgctggcgcgtatcgtgctgggtggcatgactgcaaaacagtgggcgcaggtgaacggcatcacaggcgaaccacgcgaccacatgagcacgttgcagcttgagcacctttcttaccttgagcagagcaatatcacgctgattgagttaggccaggactaccaccagcggaaggctgaattaattcgtctttcgcagcgttggttagcccgtcgcatggaggaaaacagccatgtgtaacgctctgaccgttacaaaaagagaaagcgccccgttgccggagcgcctttgtgaacgaatagcctactgcgccatattgcttactgtctacgaggcagattatagcgttgtggtcgcacagagtgaaggcgctgatcaccgttactacagcacgccagaaatgcagaatattttgctgcaaaatgccgttggccacgctgtccggaaagcaaaaaattttgctggtggcgcgactgatgcgattttgtcaggtcgccaggtgctgatcaatctgatgtctgatttcgttctggataaaacaaaggcgaccgcagagagccgccagtggaaaagctacatacttgaacgcatcaccaacaatgccacatttgcggctggtgggcaatgtgtcagctttgcaccaatgactctaggtttaactgagggtcattatggtgaatatgctggcttgctggtgggctattcctgctctttaacatcgccatgccgcgatgttttccaggtatgcgaccccatttttgtgcgcctgtactctttaaggaatttctcaaggataaacgcacagggcgcgaatctgtctgactcatgctcgtacgctatctttctgcgctgtcttttccgtgccggtgatggtgtattggttgattctttgttggtcatggcgctgccctgtaaaacgatgcaccgtagttcctcacaccacggcgctggtgatggttactcctgttctttggccttgcgccgctggagttcttcacgcgcgacggtgacgagttgcccgatctcctcggctgctttgacaccgattttttccacctgcgccagtgcatcgagcgaagaaaccaggggattttctccgcttccttctgcctggcggcgggcgatttcaccgcgaacggctgtaatcacgaaagcggctattgtttccccttccgttttcgaattttccatttcctcgattacatcatgggggaagcggatatttttcatttgcgatctgctgttgatgtttcctgttgccatcagaatgtccggttattttgaggtgtgtacacattacaccaaaaggtgtgttgataaaacacttgacactgtagcacacttaaatctaatctgtatatacactaatgattgtggtgtatatacagcaacgccccgcagtggtggcacacatgcagggcgtctaaccaaaccgttaaacgaggtaacgattatggctggaacacagcatacccaaactcaccctaaatttatatacaccttcctggcggtgcaccgtgattgcatagctgacggtaaaaacactgtacacgtagccgctgatacgctggttgatgcctgcgagatgctcaatgacatgggctatatctcggcaacatggaaagggcgcgaagaaaacacgctgtttattcagaaatgcgagaacaattttatctggcgttttatcgccctgagcacagcacaaccgcgcgtaattcacatcgaggccaccagcgaacaggaagcgcgtcagcaatctcctgatggctgcgtgatggtattcgctgcccgtattcgctaggaggtgcaccatgcataacctgtcaatttatgaccttaacagcattcagtttcgtgagaaattcaccgagcagctactggttaacgtggagaatggacgcgtggtaagtaattatcacctgccggatggtgcaattgccggaagcgttgaagcattgctggaactggcagaacgtgcgcgacttattaagccgttaacgaaccatcacgatgatgatctgcattttaccggacgcatggtgagtcactacgaaaacggcgtcgaggtatcccgcgaacggctgcgtgatgattgctgtttcggaacactgccggaatttagcgaactgctgacccgttgcgattaccggatcattcaggggggaagtcatgggtaatcagccagcaacaatgacaattaccctgaatgtgccagatgatttcaccgggcgcgtactggtttacctggataaagggaaagtgaaatcacaatgccgactgcgaaataatgaaattgtaagtacggtagaaggcttttctgaactatgtattcgtgcaggaataaaaccggaactgctgacaggaaaataaaaccatgaaaaagaaaaattctggctttactgccagcggcctctctcggtctgcaattcgctctggcgatatttaccgcgacaccagacgtgggggacgagtggttattcgtcacgttacgccaggcaatatcacctaccgccgtgaggcttacgaatatgactgcgtaatgccgcgccgtcagtttgagcgtgattttattctggtggaaaacaaacaattggcggtggcaagacgtgcagcctcgaatattaaaaaaatccgggcaatgttggttgcgggaggtaagaagtgaaaaacgcaccgaatttaaaatatcagccaaaggataaattcaccgaggtaatcatttttgccgggacggatgcttacgcccatgctcaacactggattgaaagcgaaggacgaaaacacggcgataacgtgccacctgtttacctggggccaacgcaactggcagatctggctaatatccgcattatcgacgatgagcgccgctttgcgcgtgtttatatcgcgggggagatagagccaatccagatcaatgctatcgctgaaaagctggcgctggctggcgtacaggatgcgaaattatacaaaggcatcaccgaccgggagccggagaactggcgcgactacctgcaacggatccgcgaacaggcagagcgcggggaaaccattcctgaaggaatcggaatagctggtggatcacccggtaaaacagaccccatgaaaccgcatattaccgaaaaagacggggcgctctggtatatcgagccaatccccaacaccagggcagaggagatgaattataaagaaacctggctgagtgaccggatgcgcacggcaggtattggtaacgacggaagggaagcgtatctgatcattgaaatgatcccggaagggacacaaaaaattatttacgaagcgatgccgcgcaatgaaatcggtatgcccgcaggatgggcgcgattacgtgggcggggagttgcaatcactaccagtgcccatttactgaacaaactggcggaatacctgcaacgtcatggagatcgcacggtgtgggaggtcacatcaacagcaggttggcattgtggagcctatgttatgcctgatggcgaggtgattggtgtgcctgaccgtcccgtagcattctgcggcggatctgccgccatcaaaggctatattgtcaggggcacggtgcatgaatggcgaaataatgttgcttctctgatgcgtggcaatcactcaatgatgcttggggtgctggtcgggctggcagccccgctaaattcccttgtgggtggtagttgttttggtattcatcttttcgcgcagtcgtcagcggggaaaaccacgactgtggaggccgccaccagcctttatggcgaccctgaaatgcttaaactctcgtgggatgccacccggcacgggctgacagtggaagcagctgcacgtaatgacggttttatccctattgatgaaattggtcagggaggaagggttaatgacattgcgcaatccgcctacagcctgtttaacggtgtgggcaggattcaggggcgcaaggacggcggtaatcgtgcggtaatgcgctggaaaatagcggcactaagcaccggagaagaagattttgaaaccttcctgttaaaagggggaattgccccaaaggcagggcaactggtgcgactgctaagcattccctttaccgatacaacggtgtttaacggttatgacgatggtgatcaacatgccagggccataaagcgactttcatcaaattattgtggcgctgcgggacgtgagtgggtgcgctggttatccgctcacaaggagctggctatcaacaccacttcagataaagaaaatgcctggctgggaaatctgcctgaaaatgcctcgtcacaggtaaggcgagtggcatcgcgattcgccatgctggatgcagccggagagcttgccaccgcaattactggctggacagctgaagaatgccgggaagcaacgcaacgggcttttgatgactggctacaggatttcgggctggaaaaccgggaaaaatatcaggtcatcagtcgcgcccgtgactttattcagcgccatgccctgagtcgttttcagccttatacctacgggaaaagcaatggggatatggataaccactatgcatcccgtataagcaatcttgcaggctatcttgtcagcggtaagcgtgaggatggaaaacccgaatatcacattatcccgtcagtgtttgatagcgaaattttatgcggtatatccaggaactttgggtgtcaggcgctggaagaagccggaatgctggtttgtgcagaacctggtcgctggacatcgaaaacagtgaagattaacggaacacagcagcgatttatcgtgctgattgatcaggcagaagacgaatagcacaacctacgctcgcagagggtcaaaaatcgcgggatatgcgggatatcgggatatggaaatatattgcataaatatcagttatttatgtgttgttgtcgtatcccgctgtatcccgccgtatcccggtatttaggtttacgagtggttgtaaaacaaacaaaataaccgtatcccggaatgtatcccgcaatatcttattgatgcataagcaaaaaaaaacttaccgggatatggcgggatatgaaaaatcacataacgctatgaaataaatgggttttttttgtttatatcccgatatcccggtaaaaaatgtttttttacgccttatagagtacagaaaaaaaggttgttcaaattttgtattacgattgactactgtcagccatcccacccggaaaaggcataaaagctgacaggtaactgacaatgagactgttttatttttacgtgccgatatgacggcaacaatgatggggcagagcatgacaaaactgaccattaacagaaaaccgaaaggtatttacggcacgccgcagaaaacgacgcaggcggcacagaagcaggataaaaccacatcggcacataaagtgatgcccggtaaccagaaagcgcagcagaagcccacaggggcgacaccgtggcggcatatgaccaaacgccagcgcaaaaaccgcaggcgcgttaaccgtctcactgagttgtggcctgaattattcagccgggaagcaccgaagccacttaaggtggggatattcgacgacctgatgcaggatatcgccgtcagggggctggcattcggtccaggggcattacgtgcgacgctggcatcttatgcgcagtgtccgcgctattaccgcgccttaatggctggtggggtgcgctatgacctgaaaggccagccgtgcggcgaggtgacaccacagaaacagaacgaggcagaaatgcggctgatggcgctgaatgagaagcgcaaacgccagcgccgggcagccagggagaaaacaggcgcatgattcacgacagcaaagcggaagcactggaagcgcgtggactgtaccggagagcggcggcgcggtgggctgaggtcatcatgctggcgaatgatgacaaggcacgggaacaggcggcaaaacgtcgcgcggaatgtatccacaaggcagcacgcccaccagcaaggcaggataatttcggggagatgcgcgaaaccatcagccgggcacatgccgggatgggattacatcagcccaatggtgaggcattcaggaaataccaaaaaaagaacaattgtagtcagtaacagaggatgggattctcttggttttttgttgatgctttctgaggaaatctactacgttgctgagcagatgaatattcaattgcatctgggttcctgataagattaatctgaatattttcatttggaatagggatatgaataaaactttaattgcaacattagtcggtatagtaatgttaaccggatgtgggccagaagagttaactccagaacagaaacaggaagtagctgctcttaaagctgaactgtcgcaaacggaaggtgaaatatcagcagctaaggaagttgaccagcagttttctggtgggttgataaaaaatctgacaacagcaagactggaaatattaggaactaataaagcgcttttggaacagcgtattaatgctattgaatcaggtgccaaaattgatgttgttgtatctggagtaaaacctgatcctgagcttgcggcttcaattaaaactgaaattgacagcttagatgcaaaaatcaacgaagccaaagctgatgctcgtcagtatagtggtggtctgataaaggtactaaaattatctactgttgccactgaagagcagaccatggcaatgttgcagcaaaagtacctcacagccaagtatggcctcgctgaagttaagctggcatcagtacaagctaatgacgcaaaaaacagtactgaaacggaagtaacagccaaaaattcccaagagcaacttcctttactcccgccagcggatggtccgtttggcttagaagccggtcttacacagaaaaacatcgaagatatgatcggtgctaagctcaagccactaccagacagtgtgaatctgtatacttctgataaattaccgaagcaaaacgcagattttgaaatgtatggtttgctgatctccccgaaagctggtttatgtcaaatacgggctttaggaaaaaatattgatactgatagctatggattggctcttaaatccaagtttgaagaattgagtaattctttaagttctctgtatggaaaggctgatactacagactttttgctggctggttcaatttggaaagatcctcaggactggatgagggggctaaacaaaaaagaacgcttcttatctgccacatggaagggaacaaaagaaataccattaaaaaacaatattgatactatatctattgaggccagagcgaacaattccactcagggatatgtctatctgcagtactcatttacaaatgacgaaatttgtcaggcagaaattgaaggggcgaaaaaaagttccctttaaacaatccgtgcaaagccccttagtaaggggcttttatatattaatgttcaacgtgggggattagatgaaagataatctagcaaaactaattgaaaatactttaaaagatattctattagctaatgctgctctaacattcatttttgcaataccaatggctattatcagtaggcatgggatgggcatcacaatctggtttataactgtgctcattgcacctgctctgtgtgcagtaggtgcatggcttgtatctcgaacatccggccatgctgaggagttctttcatcgtcggtgggctaagcgaatttatgttttttatactcttgcggctgccgagtttttgcttgtgtactcaatcgcgcaaataatgaaaaatctgatgaaataattaacaagttattatcatggagcttgtggctgttaacctgcagtgaggcgacaatcgtgtatttataaaaacttccccttttcactccccgcagcttcttctgctattgcctttatgtttgcatgcaccaacatctgccatacctttgcagaaaatcagagcattcagtgccgaaggttggtttattgatgcttttcgtttcatttgttgcaattgtctctggtatcatttcaatttgtgcaataattgcaattattgtcattcagaagggatcatcatgaaaaatcacggagtaaagccagttttactttcccggaggcagatcgaagccctgcaacgcatccaggacgaagagcgtcagaaatctgtgcttggtgtggcaccgtcgattcatgttatcgctcggcaactgatggataaggcacttaaagaggtgagactgtgaaattaaatatcagagtggataaacgccagctatggcagaaaaaagagaacagcgaggcattcagggcgttgctggtggaaaatcttcagcatcggttcagtggagagttgcctgatgctctagggaagaaactggaatccctgacggtggaaattggcgattatggctttgttgatgttgaaagcacgactgccaacacagaaatcgtaaaacaggtcgtcaatgatgtaatgaaaaccacgcttagccagccatcctggcgcaactgaatcagtaaggggcggttattgcccctttcctccatacccacaacgcattccctttccgcatgaaattattttttatcgtatatgcatgaggtgagctacatgttgatgagtaaagccgaatacgccaaatacaaaggcgtaagccgccagacagtttacgactggctcgagaaaggcgaagtggtcatgtccggtaaaaaaattgatgtggaagcgacagagcagcggaacagcccaccagcacaggggaaagacaccatttctgaaatgtggccagaaagaacgctggaaatgacatggggcgagttctggaaagcagttaaggccagagacggtaaaattcctgcgccagtaacggacgagggcatacagcagcgtgtgctgtatgcagccggggaattaggctgggaagtgcactttcttgatgatggtgctatctgccttgaggatgatgaagggcagcattactttgaaaaatacaatttgcgaggtaatgccaggctggcaattcgtatgctgcgttgcgaactctgctatgttgcaggtgattatcccgatgaaccggaatcatggagtgaagccgggttaaacgccctggctgagtgggaaaaatcagaccatcaatgacatcaaaaagtgtcaagttgagcagcttgccgggttgacactttacactctgaacacgaaaaagtgtcaacctcgctgtaagccccgccgttactggccttgcgccagatttaccacgtcaaaaagccgaaaaaatcgcgaaaagtgtcaagttgccatgcttagaaatgccaggggaggttaagttttgttaaggtttttcccgaaaaagtgtcaagtgtgtcaacccgcgatatacagatttattaaggttttgagccagaaagagttaaccgcgccgctttagaaaacttcaggcacgcatttgtgaaagcatcaaatgaagttctgtcatactttgcaaatcatgcagatgcatcgttactgagcattttaagttacagttgatgcggactgtccactttaacctttcaaaacgtttcgtagtaggtactaactagaatgccaagagtctttcaggttccgtgatgtttagcgttggatttgatattaagtgtttaaattcaatgtgttacattgtgttataaagtttattgctaacaactgtagggtagatgccaagcgcacgctaagcatgttataatcatttcaactttcataataatggatacgagagtggcgacgataatcaaaaatatagcaatcaaaggtctttttaaacggaaggacattgattggagtttaaaagatgtgaatgttttagtgggtaaaaatggctcaggtaagagcacgataattcaaagtgtttttgccctcttaaaacaagaattaaatgaaagtttaagtaatgctgcgttggctcaaataacattggccaatggaggcacaattactcacaaagttaattttcgcgaaattgactctgtccagcttctaaacctacttaataaccttaagaaaaacagtattaaaggtaaatcaaagggtaaggaaataaaggagttaaatgaacttattgagttgcttgaatcgaaaaaagaagacactgaaattaaagagttcgggatgggaactgttagcgtaagtgataatattaaaaacactaagcgaataaatgttgagttaatatcaactatcaatatgagtgccaattccatctatgaattcaaaaaaagtgatggtgagcgcaccacaattcttgatatggaaattgctggtgaattagaaaggttaaagaatactttcaaagtaagtgagtctaaaggtattctcataaaggataagttggaatcagctataaataatttattttctgaatgtaacaaagttgtttcttttagtaatggtaacatttctattaagatgagtgattctggtgaagatattaggtataatcttctttcatcaggtgaacgtcagttgttatatattctgattaaaacagctaatacttcattggatgaatctgtcttgttgatggatgagccagaaatatccttgcaccttacgtggcaagaaagattaataagcaccatcaaatcaattaacgataattgtcagttaattattgttactcatagtcctgcaatattaatgaaaggctggatggattctttcgtagatataaaaaatatttcaaaggaatcttctcatgactgagtttgaggatattaattttagcgaagaatatcttcaggtatattgtattatggctggacacaatggctttgtctttgttgaaggtctaaaagacatttctttctgggaaggcttattaaacgataaagataatgatatacgttttgatatttgtaaccctaccaataaaggaacaaaagggaaaccagtattaaaaaaattcatgagccgagcaaatcgatatgccatatttgcaatggatagtgattttgattatttatgccctaaaaacagtacagactcagagataatttgcagtaacaagtttatttttcaaacatttgtatattcaaaagagagcatcgagttacaccatgaagtccttgagtattgtctttctcaaataaagatcgctactgaaattaaattcgattttacagcatacattacagagtattcacggttgatctaccccgtgctgaagaaatttttattgcttaaacagcatcaagttagacttgatgactcagttttccatgaagcgattgctccttctgtgccacgattaacgaaccaatttgttatcaaaaatgctgtatttgaaagtatgcagcaatctaaagcggttattgaagaaaaacttgataaccttattcaagatgaatacgatgctgataaattctatgagcagttatatgataaaggattgagagaagataacgcctatcaatatatcaatggtcattttttagctgatagagttgtcatgcctgtcataaaatcattgatagagcaattgaatattaatgaaactgccttaatagtcaaacaatgcaaagataaaccaaccttaatctcggaaagaaagagtgagctaaaaaatattcttgaaactgatttgaatattaatacgctattacactgttgcaaagaaaagttcaaaactccttgtgctattgcgatcaaagaaaatgtagctcgagctttagcatgacaatggaaaataaaaaacctcatgcccttggggtttttttgctaattaattctgttctaacagaaggttatgataaaacttttaaactgtagaaatagaaaacatgacatggccttcaataaattgaaattttattcgtttggatatctttcttaattgacaaagtgaatgaagacataaagctcttaaatgaatagcttttatgtttttcccggagtctaatcatacaggcgcttatgggggtacttttgggggtatgttgaaaactaaaacataaaaatataatagaaatcaattggttatgtggtttgatttgttcctattatcgcaccattaaaatcaaagagttaccccatatttaaatacaccacgtttcctcctgtgccgcatttgtgccattgtaaccttggcaattcatcaaaatactgttctgacatcaggcagtgcaggtgcagctatttaaaccaattgctgccgccattctttgacgtagtcaatcagggcgcggagctttggtgcaatattgcgacgctgtgggaaatacagatagaagcccggaaattgtggaagaaagtcatcaagcagcgatacaagcttaccgctttcaatatatggcctgaaagtttcctgagtggcaattgttattcctccgccggcaagagccagcctcaacatcagacgcagatcattagtcgtaatctgcggttcaatcgcaaggtcgaaagttctcccgttttcttcaaatggccagcgataaggcgcaacctccggggactgacgccagccgatacacttatgggtatttcccccggaggcgagaaagcgctctccacgcccggccgcaaggatcaggacgacgggggcaggcatgaatcctcctcctgatggagacgtacagaggcgacttctgccagcacggagagtgccagagtatgcgcatcccgggctttggggaatatcccgacgggtgcccggatttgcgttgtttcctccctggaccatcccagctcgtggagcttttgcagacgtaacgtgtgggttcgatagctgcccaatgcgccgagataaaagggttttgcttctcgcgcggcctgcaacactggcagctcccggttgagatcatggcacagcaaaatgaccgccgtatcggtatcgatctgagcgctggctgaggccggaaaaagatcgaagatatggctgtcatagcctgtggctgctgcaagactcgcagttgcctgcgcctcaagagaacgtccgtaaatcatcagcctgacgcatggcctgaaccccacctcaaagccattgagattccagcccgttcgggtttgcgtgggcaggcacaccagcgattgtgcttgcggatcgtagcgcagccccgccggttttctctgttccagacggttcagcacggcgagcagaggctgtgccgagcgtagtttatggagcgtcagcgtgatcccaccgccgcagggcagaacgatgtcaaaccacggcgaaccttcgccatagcgaatttcgcgatcgcggcctgagcccatcatctccagcgcttcaaaagcggcagcggcctccacgcagccgccagagacaaaaccgcagtaacgaccatcttcgcgaaccaccatctgcgccccgagcgggcgcgctgcgccgccgcgtatctccaccagcgtcaccagcaccgctcctttaccggacattagcgcctctacggcgaagcgcagaatggtccggtggtcatcggtgagaaacgcctgctctggcttatgccagtgttcgtctttatcaaaaagcgggtatgacattgtttctccttaaaccacatccggcagcttatcgagcagcttatccagagtgatgggataatcccgtacccgaataccggtggcgttatacaccgcgttggcgatagccgcgctcacgccgcacaggcccagctcaccgacacctttggccttcatcggggaggatatggggtcggtatcatccaggaaaatcacctcctgttttgggatatccgcatggaccggcacctcataccccgccatatcgtgattaacgaagtagcccaaacggtcatccaccgccagctcctccatcagtgccgcgcccatgcccatagtcattgcgccaatgacctggctgcgcgcagttttcggattcaggatgcgtcctgcagcacacacagcgagcatacgccggacccgaacttctcccgtcgcgctatgcacgccgacctccacaaaatgcccggcaaaggtcgactgctggtactctttgctcagtgttccgaattcaatgctctcttccgctgtcagtctgccgcctgcggtggcttcatgtagcgtggcgcttcgggtaccgttggtaatcttgccgtcggcaaactgcgactgctcaggatcaaacccgactgccgaggcaatcatttcgcgaagcttcatacaggcggcgtaaacgccggaggtggaggtattcgcgccccattgtccaccagaacccgcagaaaccgggaaactggaatcgccgaggtgaaccgcaacctgctccagcggtacgccaagcatttccgctgccgtctgggccagaatggtgtagctgccggtgccaatgtcggtcatgtccgtttctacggtaacggtgccgttttgttcgaggtgaacccgagcacccgatttttccagcagattattgcgaaagcccgccgcaacaccgtggccgactagccactccccgtcgcgcacctgtccgggtgtggcgttgcgctgcttccagccaaatttatccgctccggtgcgcaagcactcgataagctgacggcgagagaagcagcgcgtcgggtcggcggggtcaacctgagtgtcattcaggatgcgaaactcgacgggatcgatgcccgctttttccgccagttcgtcgatcgcgatttcgagcgccatcagaccgggggcttcgccgggcgcacgcatggcgttcccttccggcaaatcaagcgtggcgagccgcaggccggtatgacgattcgccccggcgtagagtaattcgctttgctgtaccgccgtttccggcgtgccgccgggcaggtttccagaccagctttcatgtgagatagcggtgattttcccgctctggtcggcaccgatacgcaagtgctgaagggtggcggtgcggtgcgtggtgttattgggaatagaggggcgggggagcatcactttaaccggacgtttcaccgctcgggcggcgagggccgccagcagcgcatcgcttctcaggaacagcttgccgccaaaccctccgccgatatacggggagataatacgcacattctccacgggaactttcagcgtttttgccagatcggtgcggcaccagtcaatcatctgatttgaggtccagagggtaagcttatttccatcccagacggccatcgaggcatgcggctccatcgccatatggctctggtccggggtcgtgtaggtagcatcaatcttcaccgcagcggaggtgaaagccccgtcaaagtcaccgacgtttttgtcgggcgtgtcttccggcggctgattgacggcctgtttttcgtccgccagggagtaagctcctttattacggcgatagtgtgcctgcaccagcgaggccgccgctcgcgcctgttcgaaggtctcggccactaccagcgcaatggcctgatgatagtgctcaatagtggggccgcctaacagtctggcggtgtttttgtcgcctttgccgagtgccccggcgttactggcggtaatgacagccagtacgcccggcgctttttgcgcggcgtccgtatcaagggcggtgaggcgtcctttggcaatggcggaaccgacgatatagccataggcggcgttgggggcttcttcatgccattcgtaggcgtagcgtgccgtgccggtagttttcagcggtccgtcgatgcggtcatggggacgaccgacaaccttcagctgatcgatcgtgttttcccctgcgggtttatcaaatttcatgcctgtgccctcgcttcagccagtacggaggcaagcgttcgcttcgccaacaggagtttaaaggtgttttcagcggtgggatgggcgctggcgaacagcgtgtcatatacggcctgcgccccctgggatagctgagcatccgcagcctcaatgcgccagggcttatgtgctactccgcccagcgcgacgcgcccgctgccgtcagggtgaataatcgccgcgaccgataccagggcaaaggcgtaggaggcgcgatcgcgcaccttacggtagatatgttttccgccgagcggtggaggtaacgtcaccgcaacgataagctcaccgggaagcagggcggtttcaatgtgcggcgttttccccggtgggtgataaaaatcagccagtgtgatactgcgagtctttccctccggcgtgatggtttccaccaccgcatccagcaaccgcattgcgaccgccatatcgctcggatgggtggctatgcaggcttcacttacgcctaccaccgcgtgctgacggctaaagccttcaagcgccgcgcagccgctcccgggcaggcgcttattgcagggctgattggtgtcgtaaaaataggggcagcgcgtgcgctggagcagattacctgcggtggttgcctgattacgtaactgaccagatgcgccagcgagcagggcgcgggagagtaccgcgtaatcacgacgcacgcgctcgtgagccgccaggtcggtgttccgtaccagtgcgccgatgcgcagcccacccgcgtcggtcacttcaatcttatcgagcccgaggccgttcacatcgataaggtgggtgggcgtttcaatttccagcttcatcaggtccagcagattggtcccgcccgcgataaattttgcgccgggtacgcgctgagcgctaagtgccgcctcggctggggtgttcactcgttcataggtaaacgccttcatgattttatctcccccgcagcatcttcaatggcggcaaggatgttagcgtatgcaccacagcgacagatgttgccgctcatacgttcacggatctcatcggcagttgtttctggagcggaaaccaaatcgaccgtgacgtgactgggaatgccgtcctgaatctcttttagcaccgctactgatgagcaaatttgcccggaggtgcagtagccgcactggaagccatcatgcttgataaaggccgcctgcatggggtgaagattatctggcgaacccaggccttcaatggtggtgatctcggccccctgatgcatgactgcaagcgtcaggcaggcattaagcctgcgaccattgaccagcacggtacaggctccgcactgtccgtgatcgcaacctttcttggtaccgatcaaatgcagattttcacgcaaagcgtccagtagcgtggttcgggtatccacctcaagctgctcggttttgccgttcaccttcagtgtcaggggcattatctctggcgcgggtgtagctgccggaacgcttgccgccagcgtagaatgaggataaaccacggcggtcgccgctgttgcggcgctcactttaatcagatcgcgacgggtcaaacttaaatcgtgcggctcgtgcttcccaacccgattatcttcggggtattcgccttggttgctcataccaggcctccggtattctaaaggggaaaataagagtgcgttgcgagagtgctgatgcttttttaaatgttaagcatagtcggcgacagcaggaggattattcttaaaacgcgaatgcagctatgagcccggctaataaattcatgttcgccgggatgttgatgatgatgggagctggtttattgctttagttgtacgatgcaaaaaccaataaggaaacctgtgattttcagccctgcatcaccctgcaaatctctgtcacttctaatataaaaatagggagaaatgatggagcttatattcattggcgattaggaaaccatcttgttatacaaaacaatacagttctttacatttgccttgttttatgaatactcctgaagaggtgtataacataatggtacaagcagggtagatatgaatatatttgaacaaactccaccgaaccgcagacgttatggtcttgctgcattcattgggctgattgctggcgttgtttccgcattcgtgaagtggggggctgaagttccattgccgccacgtagcccggtggatatgtttaatgcagcgtgtggcccggaatcattaatcagggctgcaggccaaattgattgctcgcgtaattttctcaatccaccgtatatttttcttcgagactggttggggctgacagatcccaatgcggctgtttatacctttgccgggcatgtctttaactgggttggtgttacgcacattatcttttcgatagtgtttgctgtcggttattgtgtggtcgctgaagtatttccaaaaattaaactctggcagggcttactggcaggtgctttagcccaactttttgttcatatgatttcattccctctcatgggactgacgccacctctgtttgatctcccgtggtatgagaatgtttctgaaatttttggacatttagtctggttctggtctattgaaattattcgcagagatttacgaaacagaattactcatgagccagaccctgagatccctttaggctcaaacagataatgcattgaatgataaaaatggcgcaaatacagcgccatttttataggttaaaaacattgctttttatattctgattcagatagtcagtgagtatatcgcgctacttcaggatgatgtagatccgaagaacgctacagaagagaggcattgttgctggcaaatagaagaagtatcgggttttgttacccctgaaaaacgaagccccgctattatcgctggcggggcagtgcaattaattattgtatgtttataacggtgtcagcccgtatttagcccttgcacgattgcaagcctcattgacgactccgttctcaccagacatggcaaattctctgcatgtggacgatcgatttttatatatcgtgcagcaggcatttttgcccggggttcctgcaagggcaatacatcgggggtttttctgattggtaccgctcatgcatcggtgaaaaggggatatttgttcagtgagcctggcgggaatagtaccgccagcatcgtcggcttcggcccagtaaaaagagacgcggaaaaatgcacaacaggcaccacacgtcatgcatggattcagattgctcataattcaccagtacagctaaaaatcgtaaagagaacagcggtacatcgtatgtaagaacgtaccgcggttggctggggaactttcgatagtgtgagtattgaatgatttccagccgttaccgattttacgtactaattcgtgattaaaccactcgttagcaggctgcctgatacctttccgtgtctcctgaacactatggtgtgcatatgagaaagcccatcgttacaggtgatattgacgatcgcttccacatcatttaaacgatttttggggctctgaggtggaattcttccctcgaccgatggataagtcttagtccgccgaagggggcttagccggacaggaatcgctaatcttaatgaatttgtcgttatagaccagataatgattccccggctgacgtaactcaggctgatgaaccacgtctcccggacgtagataccaggcatcgccttcctcttcggtcgaatcacatcctggcttaatcagtagcttaaaccatgtgttgccagtgttacttaccgttcctgtcaccttgtcgaaggaccatttaaactgaacctgacgtggtcgtactaccagaatggtatccatcaccaccaccggctccgtgctgacctcgccgccggttgggctacgtcttgtctggttacgagtggggacttcgcgaaatgagacccggtagtagcgctcgcggttatcccgtggaccatgatagtaaaatttaaaatactcgctctcaccagcctgcaacgccagttggcggggggcgaaaagcagttcaccatccaccggtcgggtgcgcaattcactgctgcccgggctatcaatagcactgatggcaatacggtatatccgtgcgcttttgttgttattcactacacgtttgctgacaaagtcagtctcggacggcagcgaaaatgtcagattgccgaccgaaatcgcctgtgtcaaaggtgccgccagcatacagaccgctgtcagcagggccttagttaatgttacgccacgtcgcctgaacatgaatctctcctgaagcgctgacttcgccaaaccagccgttatcatctaccgtacgcagcgaaatggcgttatccattggaatcgaaaatttgactgtggtcttatccatctgccccacttcgccagagatatcagtccacggtgtggtcaaccacagcgcatcggtcatatcccgccagctatcatcgcacccggcatcgtaggtttttgtagctccgttgcgggtaataaaggaaagtgtcgccgggaacggtactttcgccttaccgtcatcggagctgaagacacaataggagcgcccgccaatcacctgcgcgggtccggtcaccttgatcagcacttcgtcggcagctgttttaccgctggtggttacgatatagccgaaatcgagtgccgactcgccgctgccaacatatccctcccgcgacggtgtctgagtatattcatcggagataatactgatgctgaaatcacggggtttgataatcagcgtgttggaggtagaaaattcataccagccagactccggtgatgtggtgttctgaaagcgaaagttgaatagatctttggtgttgatatcgctgatcccgaggttcaccatctgcttaaagaagttgctcgagaagaaaacatagatcgagtctgcgctcttcatctcgttgaaggtgtagtaataggcggtattgctcaccggtttccatgaactgccattcagactgaactgcatatcgtacgccccgacggccgaggctaacgacgagttggcgatcgccgggaatatatggattgaggtgttgctgagtccgtttgtttgcagggtatagttgaccatcttacaacttaatcctgaaaggctgccgatggtctgtgtccggcagtcggcgttcccttcgcccagagtcggtactccgtcgctgttgataaatacctccgccagcgagtgggtatttattaaccgcagatttgctgctttcgtatgggtgacgttgcgaacataccagttgccggaggcctgatccttacagcgtgcgccgctgctggcgtcatagttcacagaggtctggcaggcattgatggtcattgtaaagctgctgccgacgggcatttgttgcagatactggtaaaacgcgtctgacaacatgccgtgcatccacttcgcgccgccgctggtcaccgtcgcgccataaaatccactggcgtcggtggtttgcggcaggataagactggtggtcatattacacccagcgtaccagttgatgcagcgcaagccagttaaaggagatgaaactggtgaattttccagccacatatcaaacttccagttggtataaaggccggtgttgtaaccgttatcaatgtagccgaggctttgctgatagatggttcctgaaccagtgtattttaaaccggtccagcggttggcaccggtcaggcgcggatccagcgccccgccaggagtgacgaaaaagttgtcgtctgagttgttttcgacaaacacaaactcgcgtgccggtgcatccgcccaggttgttttgctcactgccgctctgagctcagttactggccagattagcgcgaaaattatcatcgttattagtaggttaactctcattctcttctcctgtctgcgtcaccgccgcccacgatgagaggccgctgcagaccacatcaccgacccagacggcaccgcgcgcctggttgagttccagtgccacttcgcaggttttattgccactgtagcgaaaatcgatagtgggatatttcttatccacgtccatgacaaactcgccgttttcatcggttcgggttcggccgatatggttgttaatccgtgcgttagccagcagtgtgccgtcttccgcacggatacgaccggagacggtaaccatctgcttcacctctggctcaatgacagcgacattgcctggatagagagtcagatggcttttgcggccgctgacgatatcgtagctgtcgagtgagtttttgctgttctgtaactccacctcatatcttccatagggagagagcgggagatagttacgcttgccgttaagcgggaaaatccgcccgttgattttggcgctgatctgaccgtcgtcctccagcccggtgttgaatatcaccccagcgttgccatcagtccgcccgctggcagcaatgtttttaccctgccagccgacgctgccattggcggtcaagttggtattgacgtagccgtccgccgcgctattgacgttcagcgttccgctggcgtaacgagcgtcgaattgtgcatacgccccaccgctgagggttttgtcatcaccggtatcgccggagatggcacgtgacagattggcaccaacagtgcgaatggttccttcatcaaactgtttgcgtgctgacaggtttgccatggtgtagccgttttgatgagtcatccctgcgctaaaccagttgcccagtggtagcgagagatcgagagcgatatatttccctgtattggcgttgctgtcgccgttgttatagcgctgaataccggcccgcaggccaagcgaaccaaaggtaccgctgtagacattttgatagtaatctgccgtgtaataatggctgttgtaacggcggtcatcattgtagctgatgctgaatgtgcccagcttcgaccacagtgagttcaggttgagtgtgccgccgattgcacggttgtcggcatcgctacgtcgcaattgattgccaatgcgggtttttcctggttaacccacagcgaactaaagcctcccggtagagtggcgctgatgctgccgatgctgctccatgagctgtcactggccagcatattttgcaggttaacgttgatcgcccccccaagcggcagcgtcagacgggtttcacccaccgcctgattatcgtatccatatcccgttgccgcccagctaagcgtactcaatgagccggaggtcgaggcacctgctagccaactctctttagctggtcgcgtctttttcccgttttccgaccagcgatccatatgaaagctaccgccccatacctgccacgccagtggtgcaccgacgccgcgcccccggctaaacagcttattgacccgctgggtgcgtttgctgatcacgcgaccgttaacgatcacctcaacttccacatcgtaaatcccgtacggtagaccccgggtatccacttcatgattgcccatagtgaagttctgaacgcttagtagccgcccatcacgggtgagatgtacttcgcccgccgccggtaaaaaggcgatcactggcgtggctgactggctgctgtcgaagatggtggagctggcctggtttccccaggaaaggccgtaaatcttccctgctgaaatggcggtcatcggccctaaggactgcaagttccaggtgtcgagcattccaccggcaaatcggtgaccggcaaaatcgcgttcatacatcgctttatataattcactgtcctgttgaccgctaccgatcccgtacagcgagccgtcgagcaccacatgatgttcgcgcagcgcagtaacgttattcagcgacagatagctggatgtgttgctcccgccgttacgcaactggttgttatagacgcccaagttatagctcagattactgctgagggtgttaacactggactgcccgatgtcttcgctacgtgagcgtagtacggtgcccagcgcttcgcgcttgaccaccagctgcagcagcagttggcgcaagctgagatccagctgcgcgttgtcagtcagggggatggtaagggcctcattgaacggggcgttcgccagagccatcagctgctgtcgagtttgttcgctgacactggcgttatcttcactctcttccagctgtattttccggatgcgtagctgtccatcatccagccagataaaagcgctgccgattcgctgatcgtcctggcgaccctggctaccggcgagatgaatatagagcgggacgctcatgccgtcctgaagcgcctgactgaaggcctgcggaataatcaccccacctatttgctgcgcacttatgtcagcagcgctggcatcgggttgaacgaacaaaaagaccatgccgaaggcaaactgggctttcagtcctggggagaaccgtcgtaaaggcattgtcgttatccatctgcacagctatctatttcacgggaatgaacttatcaccctgccaaagtgcaacccgtcctttgttatccgccgtgtccacgcgggtaaaacgacgcgacttgcctggcatcaggtagtaattctctttacactccttaccattggcggctttcaggcaggggccgtaagcgaggatccgcagcgtcgcatttcctgtatttgtcagggagccgttggcgtactgaaagtggtagttcgcctgacgaggggcgacgaccagaatggtgccgatgcgggcggaagcagtggccacagcgctgcggttggcattatcgcgctgcgcatcactgagggcctgatcaaaccagacaatgcggtagtagcgctctttttcatctgcgggtcccttatagaagaagcggatcacttcgctggcttgggcgggtagcagcaagctggcgggagtgagtagcaactcatccggcttgtccattgagataacctgcccgtcgtcaagcggtgaagagagccgttcgagacggatattgataaggcgaccactgtcggtactgtttttgatcgttttgctcagcgtgctgctgtcactgttcataaacgatgatatatcgccgacatccagcgcctgggccggagatattccggaaaacagcagagcgagaggcagaaggtgctttttcataacaattccgtccaggaataaagcaggggggctacccctgctggtacatcagagagattaactggtccaggtcgcgtcgaactgtacgctaacgtcgccgctccagatgccttccggtagagtgctgtaatctgttactgcggtggtaccattggtggtaccgctgatgatggagaaggtgaaaccatcctgtgcggtggtacgattgctggcattgtaaccgttagccagcgggctaaggttgccgcccagtacgccgttggcggtatcgatcatcacggtatcgccagttttttcgactgccgcgccgttataatccacgcccacattcagtgtggaacctgaggtatccaactgggttaatgtgttggtgataagacgtgaggtcagtttaaaggcggtagccgttgagtcaccctcgatagccacgtcaaatagacctttctgtgagttaaaacctttaatgccttcggcatactggaacgccaggctaccgagtggcgtcacaaccagcttactggtggtgtctttttggctgttgccgaccaggtcgctacagcctgagctgttacgtcagcagcctgcgccacacccatgccggtaaacaccgttaccagagctattgccagaaccttttttttcattgcatttcttcccgagttgaattgaggacgtgatgtcccagtgagtcattttttaaaactaacttgcctggagtttactgaaccaacttatatatttttgagtacagcttggcctcagcattacgccgatgggtatacactgtcttcacactacaattttcaattctggcaatcgatttaggttgcattccctgggccgtcatgcggataatttccatttcccggtccgtgattttatctttcttaatatcttttctcaggaacctgccattaatcacataggccagttcttttctaatatcacgactcagtcctgcgtataccacgcccctaatattgctgttgtaataccaataatttgctaaggcttctgactttctggccgcaatcaatacgacctgtttcccctttaccgcggataaccattcattatcacggtttataaattcagataaagaatccgtattgagattgataaacacgaaatcttttctaattttctccaacgatagataaattaatctgtcgatatccacaatcagttcagatagtcctttatagaagtaggcgtcatggggagaccagatgtatttatcagaacggttttgacattccatatggtttttaacctcatagtccctgctgtaatcactttgccatgtcactactttccaaacctgtaatttttacaggtgcattcagtttccttagtaaaccggaagtaaataagatacgtagtacatatcaataaaggttaaacgagattaagtttaattattttcgattgggcttaaatttatgtttttttcccgatgagtgtcaatatgtgaacggaaaaggaattcaatggttaagtcaatatttagaaaaactgaaaatattgcttttttgataagaagaaaaagacatttggtttcataaggttattggcaatataacgttcaattcttacttgcattttatattggtcaggaactttgccctgaagtgttaggaatagtcttaatgcgctgtgtgatggactagtaaaaaaacaagttttaagggtaagggatagaatataaaactataatgagctgtcattgaagatgatttgccaatcagtaagaaattttaatggattaacatgccgcacaaaatggttataggtgttcattacaataagtgatggaaaattgaacgggcgtatgtacgtcatctgttcggtaagcccccaagagccagattaagtgaagttaaacgaaggctgccagctgtcacaggaacgatggcctctttgtcagggcactgagtgcagttatctgtgcgcgttactctaactggcactcgaacgtcggcgacggggttaccggtggatcagactgttcctgtggcgtaaacgtttttatgttagtaccaacagatttaccacatttatcatcttaacagtttgagtgaaaatgcagctgcgccgcaaagggaggagactgagtggcgtgttcagtctaaaagagagttgatgccagcatacaggggcgaagctggtcaacaagtcaacattaagataatggaatattcggagagaaacgtcaggcagttggcctcaaatgaacaggaggaatatatccccaggaaaattaatgttggtgttataaacacaccaacattaatccgatctgattattaatcagacaaatatcgttaatccgtcgaattttgaatcaacgttttttcttacgaccctgaacggccttaaaacgtggattagatttacaaatcacatatagccgtccttttcgcttcacaatctgacagtctggatggcgttcttttgcggtacgcagagagttaaggactttcatcatgccccctttttcgtgctaacaaaacgaccaaaacgttgggtgaaccgtgcaacatttccttctgatgccactgttctcagcttccctgtatagaacgggtgcgatttcgaagagacatcaattgttacgtatggatacgttacgccatccagctcaatctcacggtctgttttgatagtcgagccgattttaaagtactcatcaatactggtgtcgtggaacaccacagtacgatactcaggatggatattgggcttcatcatttttacctgttatgttataacataaccataaagatacatgctcatccggatcatttcaacacccaatccctgtgaccattagtggtatgtggaatttccgcaacggggaagtctggcattgttagcagccgttggcgacgctcccataaacgcctggatgagtgattgatgatggtttcgctgagagtatggatttttcgacaatggaggttatctccactttactggccgatgatttatcgcagtatgattgattacctgacagcgtgtattcctctcccacggatataataattacttacaaaaagggagaggatgcatattttaaatatcactgaagtgaacagtttattgccgttattaatagaaatggagaaataaataggcgtattctacaattgcgacaaaaacaacgatattaatcagtttatgactgatttgttgtactttattctctttcattggtacttcctcgctttaaaaaagagtgcacttcgtaagtgcccttatataaataacgagtttggtcaaccaattttttgacatgtatcacaaatttgaatagatgtattacatcggctatcttttattgcaccaacgtcattgatatatgtcgcctgaagtcagttccgggaatgagtctgatctcaagactggcccagtccgggcgttgattggtgctgaggagtatatcgcatctcatcataatgtcgtatctcctggggtgttatacaagatatcgttgttggtaacctgggcgaggaattgagttctattaaaccgtcaactatgccagatacatactggattacactgcaggcacgccttacgagagaacgtgccgcagtgacgggttaattatctgaaagaatttgcgaggctgtatcggttactcattggtttgatagttttactctcgggagagtaatagatatttaattcattaacggaaaccagtcagttcctttcgatgcctgaatttgatcccatagtttatccggaatggttaattcatgaacaagttgtgttatcgttcatgagaagcataacgtaaagggaaaagctcgattagacggcaggatttgtcaggggttatgaacgaaattcataaatctgtttgagtgttgcgatgggtagtgcaagttcgatatctccgcaatttacagtctgatgaatgaaaatgaatatccataaaaaatatattggtttatcctggcgtatatacctacttcgatgtattgccaatcgtggtaaattaaagacaggtcattattattcactctgaataatgaattattcactgtccgcagagtaagaaatataacttaggtatctatttaatgacttgcacaaaaagctaaatttttacccataaataaaaatataatcccgcgcccaaccacctgatgagtggctacaggcactggatatattaggtggcggtgtactttcttacataaaggtatttccttttctgcggaaaaggaaaccgggaaatccctggtttttctgacaagcagacgccattatttgtgtctgcctatgttcgttaattcgttcatcaggaaattatctcaatgtcacgttataaaacaggtcataaacaaccactatttcgttattcagttctggcccgctgcgtggcgtgggcaaatatctctgttcaggttctttttccactcgctgtcacctttaccccagtaatggcggcacatgcgcagcatgcggttcagccacggttgagcatggaaaataccacggtaactgctgataataatgtggagaaaaatgtcgcgtcgtttgccgcaaatgccgggacatttttaagcagtcagccagatagcgatgcgacacgtaattttattaccggaatggccaccgctaaagctaaccaggaaatacaggagtggctcgggaaatatggtacagcgcgcgtcaaactgaatgtcgataaagatttctcgctgaaggattcttcgctggaaatgctttatccgatttatgatacgccgacaaatatgttgtacactcagggggcaatacatcgtacagacgatcgtactcagtcaaatattggttttggctggcgtcatttttcaggaaatgactggatggcgggggtgaatacttttatcgatcatgatttatcccgtagtcatacccgcattggtgttggtgcggaatactggcgcgattatctgaaactgagcgccaatggttatattcgggcttctggctggaaaaaatcgccggatattgaggattatcaggaacgcccggcgaatggttgggatatccgcgcagagggctatttacctgcctggccgcagcttggcgcaagcctgatgtatgaacagtattatggcgatgaagtcgggctgtttggtaaagataagcgccagaaagacccgcatgctatttctgccgaggtgacctatacgccagtgcctcttctgacactgagcgccgggcataagcagggcaagagcggtgagaatgacactcgctttggcctggaagttaactaccggattggcgaacctctggagaaacaactcgatacagacagcattcgcgagcgtcgcatgctggcaggcagccgctatgacctggttgagcgtaataacaacatcgttcttgagtaccgcaaatctgaagtgatccgtattgctctgcctgagcgtattgaaggcaagggcggtcagacactttccctcgggcttgtggtcagcaaagcaactcacggactgaaaaatgtgcagtgggaagcgccgtcattactggctgaaggtggcaaaattaccggtcagggtagtcagtggcaagtaacgctcccggcttatcgtccaggcaaagacaattattatgcgatttctgcggttgcctacgataacaaaggcaatacctcaaaacgcgtgcagacagaggtggtcattaccggagctggtatgagcgccgatcgcacggcgttaacgcttgacggtcagagccgtattcaaatgcttgctaacggtaatgagcaaaaaccgctggtgctgtctctgcgcgacgccgagggccagccagtcacgggcatgaaagatcagatcaagactgaactaactttcaaaccggctggaaatattgtgactcgtaccctgaaggccactaaatcacaggcaaagccaacactgggtgagttcaccgaaactgaagcaggggtgtatcagtctgtctttactactggaacgcagtcaggtgaggcaacgattactgttagtgttgatggcatgagcaaaaccgtcactgcagaactgcgggccacgatgatggatgtggcaaactccaccctgagcgctaacgagccgtcaggtgacgtggttgctgatggtcagcaagcctatacgttgacgttgactgcggtggactccgagggtaatccggtgacgggagaagccagccgcttgcgatttgttccgcaagacactaatggtgtaaccgttggtgccatttcggaaataaaaccaggcgtttacagcgccacggtttcttcgacccgtgccggaaacgttgttgtgcgtgctttcagcgagcagtatcagctgggcacattacaacaaacgctgaagtttgttgccgggccgcttgatgcagcacattcgtccatcacactgaatcctgataaaccggtggttggcggtacagttacggcaatctggacggcaaaagatgctaatgacaaccctgtaactggtctcaatccggatgcaccgtcattatcgggcgcagctgctgtaggttctacggcatcaggctggacggataatggcgacgggacctggactgcgcagatttctctcggcactacggcgggtgaattagaagttatgccgaagctaaatggacaggatgcggcagcaaatgcggcaaaagtaaccgtggtggctgatgcgttatcttcaaaccagtcgaaagtctctgtcgcagaagatcacgtaaaagccggcgaaagtacaaccgtgacgctggtggcgaaagatgcgcatggcaacgctatcagtggtctttcgttgtcggcaagtttgacggggaccgcctctgaaggggcgaccgtttccagttggaccgaaaaaggtgacggttcctatgttgctacgttaactacaggcggaaagacgggcgagcttcgtgtcatgccgctattcaacggccagccagcagccaccgaagccgcgcagttgacggtcatcgccggagagatgtcatcagcgaactctacgcttgttgcggacaataaggctccgaccgtcaaaacgacgacggaactcaccttcaccgtgaaggatgcgtacgggaacccggtcaccgggatgaagccagatgcaccagtgtttagcggtgccgccaacacggggagtgagcgtccttcagcaggaaactggacagagaaaggtaatggggtctacgtgtcgaccttaacgctgggatctgccgcgggtcagttgtctgtgatgccgcgagtgaacggccaaaatgccgttgctcagccactggtgctgaatgttgcaggtgacgcatctaaggctgagattggtgatatgacagtgaaggttaataaccaactggctaatggacagtctgctaaccagataaccctgaccgtcgtggacagctatggtaacccgttgcaggggcaagaagttacgctgaatttaccgcagggtgtgaccagcaagacggggaatacagtaacaaccaatgcggcaggtaaagcggatattgagttgatatcaaccgttgcaggggaacttgaaatcgcggccgcggtgaaaactctcagaagacggtcacggtgaaattcaacgcggatgccagcaccggtcaggcaaacctgcaggtagacaccgccgttcaaaaagtagcaaacggcaaagatgcctttacgctgacggcgaccgttgaggataaaaatggtaaccctgttccagggagcctggtgacctttaatctgccccggggtgtcaagccgcttacaggcgataatgtctgggtgaaagccaacgatgaggggaaagcagagttgcaggtggtttcagtgactgccggaacgtatgagatcacggcatcggcggggaatagccagccttcgaatacgcagactataacgtttgtagccgataaggctaccgcaaccgtctccggtattgaggtgatgggcaactatgcgctggcggacggcaaagccaaacaaacgtataaagttacggtgactgatgccaataacaatttggtgaaagatagcgaagtgacgctgactgccagcccggcttcgttaaacctggaaccgaatggcactgcgacaacgaatgagcaagggcaggctattttcaccgctaccactactgttgcggcgatatacacactcaaggcgcaagtgagtcagaccaacggtcaggtatcaacgaaaactgccgaatctaaattcgttgcggatgataaaaacgcggtactcaccgcatcatctgatatgcaatctctggtggcggatgggaaatcgactgcgaagctggaggtgacactgatgtcggcaaacaaccccgttggcgggaatatgtgggtcgacattcagacgccggaaggggtgacggagaaggattatcagttcctgccgtcgaaaaatgaccatttcgtgagcggaaaaatcacgcgtaaatttagtaccagcaagcctggtgtctatacgttcacatttaacgccctgacctatggcgggtacgaaatgaagccagtgacggtgaccattaccgcggtggatgccgatacggcaaaggacgaggaggcgatgaaataattttaagaatatgaaagtaacattctaataaacaataatggcgttgacatcttcaacgccattatttattgaatttcctgacagtagtctcgttataaattcatttagatatagcgaaaactaaaccggacgaacggggataaaaatttcgcaaacaacatcattgctatccttttctacgaaatcttcattgtaataaaaccgctcaatatcactgccgttcactctggctaaccccctggcgggtaattccatcagatagaggtttcgcgcccattcagggtagtgctcccactcaccttcatagcggaaagaggcatacagtcctcggttaattgtccactctttcggcatctctgaatcggttggtttgcataccgtaccagcaaaagtttcaaccgtgagcaaatcgaccgattttgttgacggttcaaacgtggaaacgaaatagatatccgtcttaaaattcttcatacatctggctaaatgatgacgtcgtagtttgacttcttcatccggtgatttattcgacacttcaatgtcatatttaaatgagttgccaaaaataggtgtctcaggaaagttgattaatctacactccgtcttttgctgttgacgtattaaaaaagaagggaagatatttgcgagatcccaataatcacggtggcggtattcacggggagagcagccgaataactttttaaattcgcggctgaatgactgctgtgaatcaaaatgcaaagagagtgcaatatcaagcatagatttcgcggtgagccggacaagaatggcggcacgacaaagccttcgtttgcgaatgtattctcccaaaggcacatgcatgaaatttcggaacagaagctggatgttgcgtctgctgtagccagatttctgtgcgatatcttcgattgaaatagggtgctcaagattgcactcaatccactccaggagctgctgtagaatcttctgcctgatcatctcattctccgttaattctttgtcatatcgcacattttcgttataccctgggccctaagtgtatcaaaaatagcaagggcgaaggcaaaagcactggtagcgtctgcttcgttgtccccgaaaatagagaggtttcagtcctacattattaatgaattttttgcataagtgatatcaaaatccacatactactttgaggttacgttttaacgtagactcattgttcatgcctaatggagggactgacagtggaattttccgtatagtctgcttcagagtattgcagatgcccatcaaaaatcgatttctcactgacagataaagaaatggcacaaattagttcgcttgatttgggttatgttggggagtcggtaaaacattttaatcctgaatttgttcgtggttgtcttgctgtaaaaatacatgattgatattaatcatgtattttacctaagacgacaaaaaccttttaacagggagtgatattgatcttcactctgtcatatctccggtaatatggcgtcaggcttcatcatcagaaagggggcctgacgcctgaaaagtgaacaacagacagtgttcggattatcaatattcagtttttaacgttgaactggattcattactgcgttgtttaagaatttcccgcgccgaatctgccattatcatgactgcacctgccagcatcagagtatctttcaataccaggcgaccagcaccggataaataagggaaaccatgatgagcgtcacccaatgcgggtacccatgcctccggggtggtgattaaaaatgagagtgttaccaacggtgtggtaaatgccatcagccctcccaataaacctaaccagcgattgacaggattagccaaaaccagcagagcaataatcacctccacgacgccaagaccgttggaaaaaccataggtattattggccgattgccatgcccttgcttctggtttgtattcgccttcgtgagtcagatactgtttatagtcttccgggtgttcataaaagaacgacattagtggactgtttgcgacgaatggtgtaatgctgtctgcctcgtaagggacaaactttaataacccaatccacataaaaacaattgcaatactcagacgaatcaatgtcaggccaattttatctccccgacttaacaggtgcaggtatttttccattgtgaacatccttatttatacaatactgctgttgcggttgaattattatcaattcgcatcgatgtgactttccaggatgaagcattatattttctggctatatcagcaatggcatcctccagaactgtcggtgatgctgatactgacgagacgctgatatgtttcagaattattttatcatctgcattggtggaaaatgccataacgccagataatagtgttgcaaataaaacagattttttaaacatataaaataccatcaatgaagtgattaagaagttatagagtaacagggaattaataagattcttttctctgagacgccagaatatttgttctggcgtctgattttgagtttatttgactaatgaaaatagatcattgagtgattcgctcatcgacggatgagtaaatatctgatcgcgtaatatgctataaggcagcccggcatccatcaccattttcactatattgatcatctcgtgggagtcaacacacagcagtgatgcccctaatatacgttgggttttattatcaacaatcgcttttaataccccacgagtatcattcatcactctggcacgcggaattgcagctacaggcaatgtcaccacctgaatatcagcaccactctctctggcctgttcttctgtcataccaaccctggacagtggcggtgtcatgaatacggaataaggcacatttttccgatcatcagtactacgtctgccttctcccagcaactcatcacgcacaatgcggtaatcatccagtgaaatataagtaaattgcagcccgccggtaacatctcccatcgcccaaatattgtctgcggtggtatgtaattgcttgtcaacgacaattgccccgcgctcgtttactgcgataccggcattttctggatgtaacgaagcggtagccggttgacgaccggaagctattaacagtgcatccaccgccagttgggcgtgctcgctatgcacttgcacttgattttcatggtgactgattcgctccacatgggcattgaggataatatcgacgccctgatcgcgtaaaatcgtcgcgatattatcagcaatatcccgatcttcccgaggcaaaaacagcgaagctgcttctaaaatggttaccttgctgccaaaattagcgaacatagaggcgaactcaacgccaatatatccgccgcccaaaatacctaaatgcccaggcaattcttttagattaagtaatccggtgctgtcatatactcctggcgtggtggtaattccaggaattggcggaaccacggtttgtgcaccggtattaataaaaattttctcgccatgaatttccagatttgcctcaggccgatgaacacgcaggctatgattattgataaactccgcctggccgtcgatcacgtcgatattgggcatatccgcaagattatgaaaattcttattacgtaaaaaattaaccacttcatttttacgctgtatggcacggacaaaatctgtgtgctgctgtgcgtcatgaaccaatgttttggttgggatgcagccgatattaatacaggtcccgccatacattgcatttgattgttcgatgagagccactcgccaacctgcttttgccagcgtgacggctaatgtttttccagccttgccaaaaccaataataactgcctgatatttattcatgatgatttcctgtcgaaacgcgttcatttgacatcatgactatagacgcaaaagagcaaataccatttcttcacaacgcttgatattttgtcttatcgtctggtattttctttttcttaatcagaatcacaaaacaaaaatcatgattaaccatttgatggtattagattagttatttactaagattgttggtgtttgtaatcaaaaaccactcaggagtctgatatggatgcccttagccgtttgttgatgcttaacgctccacaaggaacgatcgataagaattgcgtgttaggaagtgactggcagcttccacatggtgccggggaattatcggttattcgttggcatgcgttaacgcaaggagcggcgaagctggaaatgccgacgggagagatttttacattacgcccgggaaatgtggtcctgctaccacaaaattcagctcatcgcctgagtcatgtcgataatgaatcgacctgtattgtctgcggcactcttcggttgcaacattcggcgcgttattttttaacgtctttgccggaaacgctgtttttagcaccggttaaccacagcgtggaatataactggctgagggaggcgatcccgtttttacaacaggaatccagatcggcgatgccgggagtggatgcactgtgtagccagatctgcgctacattctttaccctcgcggtgcgtgagtggattgcacaggttaatactgagaaaaacattctcagtttgcttctgcatccacgtcttggtgcggtaatacagcaaatgctggaaatgccaggacacgcctggaccgtcgaatcgctggccagcatcgctcacatgtcccgggcaagttttgcccagcttttccgtgatgtttccggaaccacgccgctggctgtattaacaaagttgcgtctacaaatagcggcccagatgttttcccgggaaatgctccctgttgtggtgatcgctgagtcagtaggctatgccagtgaatcatcttttcacaaggcgtttgtccgcgagtttggttgtactccgggagaatatcgggaaagggtcagacagcttgcaccctgaataaaaccgccagaaatcagggcaaagataatccgcattccgggagttgtgagcctttcaactatttctatttccaacggtggtttgggctttatatatttttttctgatggactctagctcagtttttaaataaaaatgcaaactaaattgcttcaattaaataaaaccccgactattacttgatacgtgattattgtcggtgatttttttgtacaccatcagtgtatatctcaataacccctgaataagtagctctgaataggtataagggatgtagcctttttaaatggatttcttatgccaaaaatgaacgtcgatttccccataaaatgtgagcgatgccgaaagaaataaaattagttattgcatttgaagtttggatgaaagattatcatttgtcatacaaatgaggggtggtatgttgctagccaattaaaaaagaacgccatatttattgatgattgatcccccggtgggggggaaacatcgggcataaatgggcatgaagtaatggagtattagttgtgaatgtcaatttctttgtcacctgtattggtgacgccctgaaatcaagaatggcacgagactccgtgctgctactggaaaaactcggctgtcgcgtaaatttcccggagaaacagggatgctgcggtcagcctgcgatcaatagcggttatatcaaagaagcgattccagggatgaaaaatctgatcgccgcactggaggataacgacgatcccattatttcaccggctggctcttgcacctatgccgtaaaaagttacccgacgtatctggcggatgaacctgaatgggcatcacgtgccgaaaaggttgccgcgcgtatgcaggatctcacctcttttattgttaataaattaggggtagtcgatgtaggtgccagtttgcaagggagagctgtgtatcacccatcttgtagcctggcccgtaagctgggagtgaaggacgagccacttacgctgctgaaaaatgtgcgtggactggagctgttgacctttgctgaacaggatacctgctgcggatttggcggcacgttctcggtcaaaatggccgaaatatccggcgagatggtgaaagaaaaggttgtgcacctgatggaagtccgccctgaatatttaattggtgctgacgtgagttgcctgctgaacatcagtgggcgattacaacgggaagggcagaaagtcaaagtgatgcatattgctgaagtgttgatgagccgctgaggatataaagatgtcgatcaaaaccagtaatacagattttaagacacgcatccgtcagcaaattgaagatccgatcatgcgcaaagcggtggcaaacgcgcagcagcgtattggggcaaatcggcaaaaaatggtcgatgaattggggcactgggaggagtggcgcgatcgggccgcccagatacgtgatcatgttctgagtaatctcgacgcttatctgtaccagctctcagaaaaagtgacgcaaaacggcggtcacgtctggtttgcaaaaaccaaagaagacgctacccgctacattttacaggttgcccaacgcaaaaatgcccggaaggtggtgaaatctaaatcgatggtgaccgaagagattggtgtcaatcatgtgttgcaggatgctggcattcaggtgattgaaaccgatctgggtgaatatattctccagctggatcaagatccgccatctcatgttgtggtcccggcaattcataaagatcgccatcagatccgtcgagtgctacacgaacgtctgggctatgaggggccggaaacgcctgaagcgatgaccttattcatccggcaaaaaatccgcgaagatttcctcagtgctgaaataggtattaccggctgtaatttcgcggtggcagagacaggttcggtatgcctggtgaccaatgaaggtaatgcgcgaatgtgtaccacgctgcctaaaacgcatattgcagtgatgggaatggagcgtattgcccccacgtttgccgaggtagatgtattgatcaccatgctggcgcgcagtgccgttggtgcacgtttgacgggatacaacacctggctgacaggaccgcgcgaagcggggcacgttgatggtcctgaagagtttcatctggttattgtcgataacgggcgttctgaggtgctggcctctgaatttcgggatgtgctgcgctgtattcgctgcggggcttgtatgaatacttgtccggcatatcgccatattggcggtcatggatatggctctatttatccagggccaattggtgcggtgatttctccgctacttggcggctataaagattttaaagatttaccctacgcctgctctttatgcactgcttgtgacagcgtgtgtccggtgcgtattccgctgtcaaaactgattttgcgtcatcgtcgggtgatggctgaaaaagggatcaccgcaaaagcagagcaacgggcgataaaaatgttcgcttatgccaatagtcatccaggattgtggaaagtcgggatgatggccggtgctcatgcggcaagctggtttatcaatggcggcaaaacaccactcaaatttggcgcgattagtgactggatggaagcacgcgatcttcctgaagctgacggagagagtttccgtagttggtttaagaaacatctggcgcaggagaaaaagaatggataatcggagcgaatttttgaataacgttgctcaggcactgggtcgcccgttgcgacttgaaccgcaagcagaagatgcgccgcttaacaactatgctaacgagcggcttaccgcacttaaccaacagcagcgctgtgacgcgtttattcagtttgccagcgatgttatgttgacgcgctgtgagctgaccagcgaggcgaaggcggcagaagctgcaatacgtctgtgtaaagagctgggagatcagtcggtcgtgattagcggtgacacgaggctagaggaattggggattagcgaacgtttgcagcaggaatgcaatgccgttgtttgggatccggcgaaaggtgccgagaatatctcgcaggcagagcaggctaaagtgggtgtcgtgtatgctgaatatggtttaaccgaatcgggaggcgtggttcttttttccgccgccgggcgcgggcgttcattgagcctgctcccggaatcttctctttttatcctgcgtaaaagcactatcttgccgcgtgtagcgcaactcgcagaaaaattgcatcagaaagcgcaggccggtgaacgaatgccgtcctgcattaacatcattagcggccctagttcaacggcggatattgagcttatcaaagtcgtcggggttcatggtccggtgaaagcggtgtatctgattattgaggattgttgagagagatatgaagtctggacataaacctgaagaaggcatacgaggttgaaaatagcgtttaggacaacctgacttaaccccgttccgtcatggttatgctgctcttctgtaaatatcctggcattagtaatgccaggatatttacagtgaaaaagacaggcatccattcctgaaaacgggttcccttcccggtcattgtcacttcagctttatacaggcactctctatcagaatgctgtttattactacccagagttttgttggtattcatctaccatttttttgacaaggcaaaacattacagaaattacaatgcttagaaaaaatcccagagccaggcaaatggcagcagggtatttattttttatttctggtgagcttatagttacacagccatcaccgttcggatacaatgaccagttcctggtcaggtatatcatttttgtataaagctcactgttaattgctgaaggtgtttgtatctcatcgagaacttgcctgccattatggtattctgacgcataccatttgataatagacgcctgcacgcgagatatttccgcttcagcagttggtaaatctctcttatctcctgaccattccagctttatttctctgttcttgacatctgggctggtgtgaaaaaatgtagtaattcgctgtataacatcttcagtcattgtggtctgacaggcaaagttattattgctatcacagttaacaagtatgcctggtgttgtctggtttatttttaggctgtaactcacttttatattatctttattgatatacagaaacaacagcaccattgccatacagatagctataataaaaaggataacgcgaatctttttcttcagataaaataaaatctcaatcagatcgatatcctgtttgatttgttcacgcataatatatccagaaaataaaatctgtcgcagataaggttgtattaatagtctgtatcaggaatgttcgggttaaatatcagcaaaaagccagcatcatgaatactggatatgaagcatgagagttacctcagtgtttatataaggattcggtccccctctctggaacggtaactctcaatctgatcggttcctgcgttagttcacatcacgactcattttttcgctctcaccggcatcccatttgccacaaaatatcccgccgtgctcctcggcagcgcttcctgtccacgaatcatatccgctattttctcgccaatcataattgtcgtggcgttcaaattcccggtgataatctgcggcataatcgacgcatccaccacacgcaggccttctaacccgtgtacgcggccttcgccgtcaaccacggacatctcgtcgtaacccattttgcaggtaccgcacggatggaaggcggtttcggcgtggttacgcacgaactcatcgagctgttcatccgtctgacattccgtgccggggctgatttcgcggccacgatactgatccagcgccggttgatgcatgatctcccgggtgatgcgaattgcgtcgcggaactcctgccagtcctgctcgtgtgacatgtagttaaacagaattgccggatgctggtgcgggtcgcgggatttaatccgcacatgcccacggcttggcgagcgcattgagccgacgtggcactggaaaccgtgctccttcaccgcattcgagccgttatagttaatcgctactggcaggaaatggtactgaatattcggccacgcaaattcctctcggctgcgaataaatccgcctgcttcaaagtggttgctggcaccaacgccagtgccgccaaacagccactccgcaccgattttcggctggttccaccactgcagggcagggtagagggaaaccggttctttgcactcatattgcagatacatctccagatgatcctgaagattttcgccgacgccgggtaattcatgcaccagcggaatatcaaactccgccagcagttcagcgttgccgacgccggagcgttgcaggatctgcggtgaggcaatcgcgcctgcacataacagcacttctttgttggccgttgcgcgggttgggatggtgctgtcgccttccagccattcgacgcccaccgcgcgtttgccgtcaaaaatgatgtgatcggtcatagcgtgagtacgaatggtcaggttagggcgcgatttggcctgatcgagataaccgcgcgcggtactggcgcgacggccctgcggcgtgacggtgcgatccatcgggccaaaaccttcctgctgatagccgttgagatcgtccgtgcgcgggtagcctgcctgcacgcccgcttcaatcatcgcttcaaacagcggattgacgccgggtttggaggtggtgacgctcaccgggccatcgccaccgtggtagtcgttctcgcccacatcgcgagtctcggccttgcggtagtagggcaggcagtcgagataactccagttctccagaccgggttcttgcgcccagttatcgagatccagcgcattgccacggatgtagcacatgccgttgatcagcgacgatccacccaggcctttaccgcgtccgcactccatgcggcggttattcataaacggttcaggctctgtttcataggcccagttgtagcgtttgccctgtagtgggaacgccagcgctgcgggcatctgggtgcggaagtcaaagcgatagtccgggccgcccgcttcaagcagcagcacggaggtattcggatcttcagtcagacgggtagcgagaacgttgccggctgagccggcaccaataatgatgtagtcaaattgcaaataaacctcctggttagaatatggactggaatttagccatctcaacctggatggacttcacctgggtgtaactctggagcgtcatcacgccgttctcgcgaccaatgccggagtgtttgtagccgccaacgggcatctctgccggggattcgccccaggtgttgatccagcaaatacccgcttccagctgatgaatgacgcgatgcgcgcggttcaggtccgccgtcacgatgcccgccgccaggccgtagtcggtatcattggcgcggcgaatcacttcgtcctcagattcataagtgagaagcgacatcactggcccgaagatctcttcacgcacgatggtcatatcgtcgctgcaatcggtgaacactgtcggtgcaacccatgcgccgttatcgaagccatcgcctttcagtacatcgccgccgcacagtacgcgcgcgccttcctctttgcctttggcgatatagcgcagcacgttatcgcgatgcgggaagctgaccagcgggccgaagttagtttgcggatcgaaaacgtcgcccgcgcgaatgcgctcaacgcgcgccagaattttctgctcaaatgcggctttgcatttcgccggaacgaagacgcgggtgccattggtacacacctgaccggagctgaagaagtttgccatcatggcgatatcggcggcgagatcgagatccgcatcatcgaaaacgatcagcggtgatttaccgcccagttccatggtcacttctttcagggaagaggccgccgagttagccatcacttttttgccgctggcgacaccgccggtaaatgacactttggcaatgcccggatgctcggtcagatattgcccggtctccgcgcccacgcccggcaacacgttaaatacgccgtccggcaggcccgcttcgctgtaaatttcagccagctttaacgcggtaagcggggtaacttcgctcggtttgaaaatcattgcgttgcctgccgccagcgccggggcggatttccacagggcaatctggatcgggtagttccatgcgccaatccctgccactacgcccagcggttcgcggcgggtatacacaaaggacgtttcacgcaacgggatctggctgccttccagcgccgggatcagcccggcgtagtactccagcacgtccgcaccggtaacgatatcgacggttgaggtttccgaatatgcttttccggtgtcgagggtttccagttttgcgagttcgtcattgcgttcacgcagaatatcaacggcccgacgcagaatacgcgagcgctccatagcggtcatcgccgcccagattttttgcccctgttgggcactcttcacggcgcgatcgacatcctcacgcccggcggcctgcacggtcgccagcacgttaccgttggccgggttaatggtctcgaaggtgcgaccgctggtggcggaggtataaccaccatgtatataaagctgctgttctgccattcgggacatcacgtctcctcggttaatcggtgggtaaatgctgagtaataaagtgacgggtcagcgagtgtgcgagaggtttatccagcggtttgccgctcagtgccgcgcgcagccataatccgtcaatcagcgcggcaaggccgtagcccgcttcctgtgcctgttggcgcggtaactcgcggcgaaattcgctcaccagattcgacaataagcggcggctactgacctgctgtaaacgatagagcatcggctgatgcatactgctggcccagaacgccagccaggctttcatcgccgcactgctcacctgcgtttcatcgaagtttccgccaacaatcgcctgtaatcgctgctctgcactgccctgcggaagtgcatgtaatcgattcaaaaccgcgtcacgcagctgactggtgatatcgcgcatggttgcttccagcagaccatttttgtccctgaaatagtggctgatgatccccgtagaaacgcctgcacggcgggcgatctgcgcgatcgttgcatcgtgcatgcccacttcatttattgcttccagtgtggcgtcgatcagttgtctgcgccggatcgactgcatccccaatttgggcattttcgccactccattcatcagcgttgtttatctattaaagcggttattgattggacgttcaatataaaatgtgtcttaattgttacgaatttgattttaaatggtaacaataacagtggggatactggatgacagacctttcacacagcagggaaaaggacaaaatcaatccggtggtgttttacacctccgccggactgattttgttgttttccctgacaacgatcctgtttcgcgacttctcggccctgtggattggccgcacgctggactgggtttctaaaaccttcggttggtactatctactggcggcaacgctctatattgtctttgtggtctgtatcgcttgttcgcgttttggttcggtgaagctcgggccagaacaatccaaaccggaattcagcctgctgagttgggcggcgatgctgtttgctgccgggatcggtatcgacctgatgttcttctccgtagccgaaccggtaacgcagtatatgcagccgccggaaggcgcgggacagacgattgaggccgcgcgtcaggcgatggtctggacgctgtttcactacggcttaaccggctggtcgatgtatgcgctgatgggcatggcgctcggatactttagctatcgttataatttgccgctcaccatccgctcggcgctgtacccgatcttcggtaaacggattaacgggccgatagggcactcagtggatattgcagcggtgatcggcaccatcttcggtattgccactacgctcggtatcggtgtggtgcagcttaactatggcttgagcgtactgtttgatattcccgattcgatggcggcaaaagcggcactgatcgccttgtcggtgataatcgccacgatctctgtcacctccggtgtcgataaggggattcgtgtgttatcggaacttaacgttgcgctggcgctgggattgatcctgttcgtattgtttatgggcgacacctcgttcctgcttaatgcgctggtgctgaatgttggcgactatgtgaatcgctttatgggcatgacgctcaacagttttgccttcgaccgtccagttgagtggatgaataactggacgctcttcttctgggcatggtgggtggcatggtcgccgtttgtcggcttgttcctggcgcgtatctcgcgtgggcgtaccattcgccagttcgtgctgggcacgttgattattccgtttaccttcacgctgttatggctctcggtgttcggcaatagcgcgctgtatgaaatcatccacggcggcgcggcatttgccgaggaagcgatggtccatccggagcgcggcttctacagcctgctggcgcagtatccggcgtttacctttagcgcctccgtcgccaccattactggcctgctgttttatgtgacctcggcggactccggtgcgctggtgctggggaatttcacctcgcagcttaaagatatcaacagcgacgcccccggctggctgcgcgtcttctggtcggtggcgattggcctgctgacgctcggcatgctgatgaccaacgggatatccgcgctgcaaaacaccacggtgattatggggctgccgttcagctttgtgatcttcttcgtgatggcggggttgtataaatctctgaaggtagaagattaccgccgtgaaagtgccaaccgcgataccgcgccgcgaccgctggggcttcaggatcgcctgagctggaaaaaacgtctctcgcgcctgatgaattatccgggcacgcgttacactaaacagatgatggagacggtctgttacccggcaatggaagaagtggcgcaggagctgcggttgcgcggcgcgtacgtggagctaaaaagcctgccgccggaagagggacaacagttggggcatctggatttgttggtgcatatgggcgaagaacaaaactttgtctatcagatttggccgcagcaatattcggtgccgggctttacctaccgcgcacgtagcggtaaatcgacctactaccggctggaaaccttcctgttagaaggcagccagggcaacgacctgatggactacagcaaagagcaggtgatcaccgatattcttgaccagtacgagcggcaccttaactttattcatctccatcgtgaagcgccgggccatagcgtgatgttcccggacgcgtgattgtttttgcataaaaccgcgccatgtctgcatatggcgcgggaatcattgactcgctgtaaaaaattatgcatatattatatatgattgtcatgtcatatcctgaaattcctcttgtatcacttcatgactttatattttattaattaacgattttattttgtattagctgaatggattcagtcctatagagttatatatttattaataagacgattcttatatttggatacctaataagagttaccacttttaccgtctgtatattaaatgtattcctcctgcttttgtttatattttgagttgatttgagttcctggatacatataatgcgcaggtattagagactgggaggaatgtaatgataaagttaagagtgttaacttaaaataagttttcagtagtaacttgctattttattaccctctgaactacatactcagatatgtggttgccaatgctatgcaaaatttttgaatttttatatgcgatgaacagtaaccagaatggcatttaatgcgttgctgtttatgcaatcttggttttatttggatgtattgctggagattgtgatgaataaaatatatcggctaaagtggaacaggtcccgtaactgttggagcgtctgctcggagctggggagcagagtaaaaggaaaaaagtcccgggctgttttaattagcgcgataagtttatattcatctctggtattcgccgatgatgtcatcgtaaaccaggataaagctattgattttggcaaagagaaccagagcatcgattatcgtattacggtgactgacaatgccaatctggtaatcaatgcgacagatacttcccgtccgcgtctgactctcgcttctggtggtgggttggatattaccggaggaaaggtaactatcaatggcccacttaactttttgctgaaaggtacggggttcctgaatgtctccaatgctggcagcgagttatatgctgatgatttgtatgagtcaaactcaggcatgagacacgatcgcggctattttaatgtctccaacggcggcaaaatccatgttaagggcaccagccgtctgacctatttgcagggaaatgtcagtggtgaaggcagccaggtaaattctaaaaccttctttatgggcgtttacggcagttacggtggtaatcagtacctgtcagttaataacggcggtgaagttaatgccagtgagaaaattagcctgggttattatgatcaaaactccgatacaacacttgctgtttcggaaggtggtaaaatctctgcgccgactattagtttaagcaccaactctgagttagcgttaggtgcacaggaaggaagcgcagcgaaggctgcagggattattgatgccgaaaaaattgagtttgtgtgggcaaagacatccgagaagaaaatcaccttaaaccacacggataaaaacgcgactatttccgcggatattgtcagtgacagcgagggcctgggctatatcaatgcgctcaatggtacgacttacttaaccggggataactccgcctttagcggtaaagtcaaaattgagcaaaatggcgctttagggatcacccaaaatataggtaccgcagaaatcaacaaccgcgggaaattacacctgaaggctgacgatagcatgacctttgccaataagatttccggcaacggtacaataagtatcgacagtgggacagtggcgctgaccggcaataactatgcattcagcggatatattgatgtcgcttctggtgctgtcgcggttatttctgaagacaagaacatcggccgtgcggacctggatgttgatggcaaactgcaaatcaatgccaataaagattgggtatttgataacgatcttcaaggtagaggtattgttgaaataaacatggggaatcacgaattctccttcgatgagtttgcttatacagactggttccagggttcactggcgttccagaacacgacatttaacctggaaaagaatgctgagtttctgcagagaggcgggatcactgcgggtcagggaagcctggtaacagtgggtaagggcgctcactccattagcactttgggattctccggcggaaccgttgattttggtgccctgacagcaggtgcacagatgacagaagggacggtcaacgttagtaaaacgctggatttgcgcggcgagggtgtgattcaggtttctgacagtgacgttgtaagctcagtatcccgtgatattgactctgcgttatcgctcactgaagtcgatgatggtaacagcaccattaagttggttgatgcgcaaggtgcggaagttctgggcgatgcgggcaatctgcaattgcaggataaaaatgggcaaatcctctccagcagtgcccaacgtgatattcagcagaatgggcaaaaagcggccgtcggcacttacgactatcgtctgacgagtggggtaaacaatgacggtctgtatatcggttacggcctgacccagcttgatttacacgctaccgacagcgatgctctggtgctgagctctaacggtaaaagcgagaatgccgccgatctcagcgcaaagattaccggcagcggtgacctggcattcagcagccagaaggatcagaccgtatcgctttctaacaaagacaacgactataccggtgttaccgatctgcgcagtgggacgcttttgttgaataacgataacgtgttgggtaatacccatgaactgcgtctggcggcagagactgaactggatatgaatggtcacagccagaccgtgggcacgctcaatggcagcgccgattcactgctgagcttaaatggcggcagtctgacggttaccaacgggggcacttcaaccggttcgttaacggggagcggagagctgaatattcagggcggcacgctggacatcgcgggcgataacagcaacctgacggcgaatgtgaacattgctaattcggctaatgtcctggtaagtcatgcgcagggattgggtagcgcaaacgttgagaacaacggtaccctggcgttgaataatagcgctgaaaaaagagcggctgcgtctgtgaattacaccctgggcggcaatctgaccaacaacggtacgctgatgaccggaatgtcaggacagcaagctggcaatgtgttagtggtgaaggggaactaccacggtaataacggtcaactagtaatgaatacggtactgaatggcgatgactcagtaaccgataaattggttgtcgagggcgatactagcggcacgactgccgttacggtgaataacgctggcggtacaggtgcgaaaacccttaacggtatcgaacttatccatgtagacggtaagtctgagggcgaatttgttcaggctggtcgtatcgttgcgggggcgtatgactacactctcgtgcgtggacaaggggcaaatagtggtaactggtatctgaccagcggcagtgattctcctgaactgcagccggagccagacccgatgccgaatccggagccaaacccgaatccagagccgaaccctaacccgacacctacgccgggtccggatctgaatgtggataatgacctgcgaccggaggcgggtagctacattgcgaaccttgcagcagcgaatacaatgttcaccacgcgtctgcatgagcgtctgggtaatacgtactataccgacatggtgacgggtgagcagaaacaaaccactatgtggatgcgccatgaaggtggtcataataaatggcgtgatggcagcggccagctgaaaacccaaagcaatcgctatgttctgcaactgggaggcgatgtcgcgcagtggagccaaaacggcagcgacagctggcatgttggggtcatggcgggatatggcaacagcgacagtaaaaccatttcctcgcgaaccggttatcgtgcaaaagcgagtgtgaacggatatagcaccggcctctatgccacctggtatgccgatgacgagtcgcgtaatggcgcgtatctcgacagttgggcgcagtacagctggtttgataacacagtgaaaggggatgacttacaaagtgaatcctataaatcaaaaggatttaccgcttcactggaagctggatacaaacacaaattagctgaatttaatggcagccagggaacgcgtaatgaatggtatgttcagccgcaagcacaggttacctggatgggagtcaaagccgataagcaccgcgaaagcaacggaaccctcgttcatagcaacggtgatggcaatgttcaaacccgacttggcgtaaaaacctggctgaagagccaccataaaatggatgacggtaaatcccgcgagttccagccgtttgtagaagtgaactggctgcataacagtaaggatttcagcaccagtatggatggcgtgtccgtcactcaggatggagcccgaaatattgctgagataaaaccggggtggaaggacagctaaatgccaacctgaatgtctgggggaatgtgggcgttcaggttgccgataggggatataatgacacctctgcaatggttggcattaagtggcaattctgatctgaataatgagtaaaaggagagagagccgaacgggagataattcggctctctgtgtcattttcttgcagccagctttatcagtcagagtgaagactcgcagatttagctggcgcacaagatttaatcaaggtgtgttcaatggcttcgcatgatttgagtgtttttttggaagagttcggggcaacggtgaatttgacgttgcctggtatcgtgtccgaaaaagaacggcttttactcaagctgctaatggagggaatgtcggttacagaaatctcacagtacagaaatcgcagtgcaaagacaatttcacatcaaaagaagcagctgtatgaaaaactaggcatccagagtgatattaccttctggcgggatatcttttttcaatatcatccgcaagtcatcagtggcacgggaaataaaaataatttttatatccctgataaccgttgtcaccatatcgtcacgcctgaagccatcagtctggcgttggaaaaccacgaattcaaaccgtggatccaaccggttttctgcgcgcagactggggtactgacgggctgtgaggtacttgtccgctgggaacatccacaaacgggaattatcccaccggatcagtttattcctctggcggagtcatccggtcttattgtcataatgacccgccaactgatgaaacagactgcggatattctgatgccggtaaaacatttgctgccggacaatttccatattggcatcaacgtctcggcgggttgttttttggcagcgggatttgaaaaagagtgtctgaacctggttaagaaattaggtaacgataaaatcaagctggttctcgagctaacggaacgtaatcctattccggtaacgccagaagccagagcgatatttgacagccttcatcagcacaacattacctttgcgctggatgactttggtacgggttatgcgacctatcgttacttgcaggcgttcccggtcgattttattaagatcgataagtcatttgtgcaaatggcgagtgtcgacgaaatctccggtcatattgtggacaatattgtcgaactggcgcgtaagcctggtctgagtatcgtggcggaaggggtagaaacccaggagcaggcggatttaatgatcggtaaaggcgttcactttttgcagggctatttgtactctccgccagtaccgggtaataaatttatctctgaatgggtaatgaaagcaggtggttgatgtaaaccgctattcacagcgcatcgggaggttggcagcgattaattctcccgatgcagtaaatcctgatagatccccgttaatatgccatttggcgcaaattgttttttaatccactgcgtcacctgacccgtagcagaatgctgagtcgccagtaacatgcgcgaatcctggcgcggattatggatttgtcgggtaaccagcagggattgcgtcatcgcctcacggaccatgtaatccggcaaaaaaccaattccttcacctaaaatctggcactgacatttggtgttgaaatctggcaccagaattgactcctgcccgtgcagcaaccagcccacttttttattaatcgtatgcgcggtgtcctccaccataatattagggtagagacgcagttggctttcggcgatgggttccggcacaaaggctaacgggtgatccggggcgatagcaaaagcccagcgaatcgcgccaatttcagtgtaatcaattccgccgccgtccagtagtgtatcgggtgcgccgatggcgatattggcctgattattaataatcgcatcccagacgccgttatacacttcggtggtgacggtaatctggcaggtaggaaactgctttttcagcacctgtaacaagcgtgcggtgtgtttgggcgtataaagcagctgattaatacaaatgcgcacacgtgcttctatgccctgcgaaatagtatcgatactgcgtttgatggcgtgaaaatcattcagcaggtcggtagctttgcggaaaaaataacgcccggactccgttaactcaatgctgcgggtactgcgagtgaacagcaccacatccagccccgtctccatacgcttgatggtgtagctaatggcggaagtggttaaacccaactcttctgcggctttactgaagctgccaaaacgcgcagcggtagtaaatgccaacagattctcttcggtaaaaattgagttcattaaaccattctcgccattatctactatgaatttctccagctatgactgtagaggtatcggttaaagatagataatcatttttgaataacttttaatacccgtcgcgtttagtcgtcgcttcgcttaatttttgtccaccatattctgaaattatccccacgcagttacccgccagaaaacccagtaacgtcaccgtccagttcatcccgctggcaaaaaacagcgtcatgccgagaaagccaccgggaataaaggacagtaaccagaaacgcccttgccagaccactaccgccgagaagggtacggtagtaattacgctcgcccagaacgcggacagtccacttacagaggccagccaaccggcagccagcgcggcgaaaaatgcccacaccatcccggaataattaaccgccagacttctgataaaccccgatttaccgccgcctgcggcataaaaactgcaaaaggcgacgaagccaatggttcctaataattcccatccctgagagagcccgacatgtgaagacactaactgccaaagccctgcacaaataccgacggtgacacccgttgccgtgagtccgttcatcttgttcccctctggttagacatggacgaaagctactcttacatgtgcagactatagagaaataaaacctgattgagtgaaagggtatcgggtcaaagaaacaaatattgcactaccgcacactgcgaaaagattgttgaacatcattcaacaaaaaggcgaaatacagcgaattaaatttaagcgggttcttttatcagattatcgttgctattctcaattcatcgaaaacagccacaaaaaccaggggaatgtgaatgagtataaaaaatctacctgccgactatttattggctgcacaacagggtgatatcgataaagtaaaaacctgccttgcgctgggtgtcgatattaatacctgcgatcgtcaggggaaaacggcaattacgctggcaagtttatatcagcaatatgcttgcgttcaggcattaattgatgccggagcggatattaataagcaagatcatacctgtttaaatccttttttaattagctgtctgaacgatgatttaactctactacgaattattttaccggctaaacccgatcttaattgcgtaacccgttttggcggtgtcggcctgacgcctgcctgtgaaaaaggccatttaagtattgtaaaagagcttttggcgcatacggagattaacgttaaccagaccaaccatgtaggctggacgccgctactggaagcgattgtgcttaatgatggtggtattaaacagcaggcgattgtgcagttattgctggaacacggtgccagcccgcatctgaccgataaatatggcaaaacgccactggaactggcgcgggaacggggctttgaagagattgcgcagttactgattgccgcaggtgcataaaccgggaggcttgctatcaacacaccagaaagacggtgtgtgtgggcgctaactgcggatgcggattttctggcgcagcgggggcaaggacaggttgaacaggtctttgccagagcggtaaatatcgcactcccggctcgccagcagttgctgacgctgctttgtgaagagtacgacaatgcgccaaacagttgtcggttggcactcactcactttgatgatctgttccggcatggtgataaggttcagtttgacgatcaaggtattacggttggtcaacatcttcatatagagatgagtcgttgtcggcgttggctgtccccaaccttgcaaatgaccgctgtgaattttcaccttatcgcctggctacagtggcacgacattattcatcagcacctgggggaaaatgaaaccctgtttaattatcgcggcgataatccgttttatcaggcgttaaataaagaactacatattaaacgacgggcagttattcaggcagtaaacgaaaaacaaaatatcgccgcagcggtcgccagtatgattgggttagggattggccttacgccatcagccgacgattatttaacaggtctggcgcttattttatttattcccgggcatccgtcggaaaaatacaaagaggaattttatctcggtatgcagcgcggcagaaataacaccacattattaagtgctataacgctggaagccgcattacaacaacgttgccgggaaaatattcatcgttttattcacaacattatttatgacatccctgggaacgcaactcaggcaatagaaaaaattaaacatattggctccagttccggctgcgacatgctgtatggcatggccgatggttgtgcgctgagccaaacctacggagggaattatgtcagttaaaatagtcattaaaccgaatacctattttgattctgtctcgctgatgtctatctccacgcgtgcaaataaactcgacggcgtcgagcaggcatttgtggcgatggcgaccgaaatgaacaaaggtgtactgaaaaatttaggactgctgacgccggagctggaacaggcgaaaaacggcgacctgatgattgtcatcaacggcaaagcgggcgcggacaacgaacagttgctggtggagattgaagaactgttcaacagcaaagcgcaaagcggctcgcacgaggcgcgttacgccactattgccagcgccaaaaagcatatcccggaaagtaacctggcggtgatttcggttaacggtctgtttgccgctcgcgaagcgcgtcaggcgctgcaaaacgaccttaacgtgatgctgttttccgataacgtctcagttgaagatgaactggcgctcaagcagttggcccacgaaaaagggctgctgatgatggggccggactgcggcacggcgattattaacggcgcggcgctctgttttggtaacgccgtgcgtcgcggcaatatcggtattgttggcgcatccggcaccggcagccaggagctgagcgtccgcattcatgaatttggtggcggtgtttcacaactgattggcaccggcgggcgcgacctgagcgagaaaatcggcggcctgatgatgctcgacgccatcgggatgctggaaaacgatccgcaaactgaaattatcgcactgatttcaaaacctcccgcgcctgcggtggcccgcaaagtgctggaacgcgcacgtgcctgccgcaagccggtggtggtctgcttcctcggtcgcgttgaaacgccggtggatgagcaggggctacagtttgcccgcggcagcaaagaggcggcgctaaaagcggtgatgctctccggcgtgaaacaggaaaatctcgacctgcatacgcttaaccagccgttgattgctgatgtgcgtgcgcgtctgcaaccgcagcagaaatacattcgtggcctgttctgcggcggcacgctgtgcgacgaaaccatgttcgcggtgatggaaaaacatggcgatgtctacagcaacattcagcccgatcctgaattccgcctgcaagatatcaaccgcagcatcaaacacaccttcctcgactttggcgatgacgacttcaccaacggcaagccgcatccaatgattgaccccaccaaccgcatcagtcgcttgatcgaagaagcgcgcgatccagaagtggcggtgatcgtgatggattttgtgctcggatttggatcgcatgaagatccggtcggctccaccatcgaggcgatcaaagaagcgaaagcgatcgccgccgccgaaggacgcgagttgatcattctcgcctatgtgctgggcaccgatctcgatacgccatcattagaacaacaaagccagatgctgcttgatgccggagtgattctggcgagcagcagcaccaataccggattgctggcgcgtgaatttatctgcaaaggggaggaagcctgatgagccagtcactgtttagccaaccgttgaacgttattaacgtcggtatcgccatgtttagcgatgacctgaaaaagcagcatgtagaagtgactcaactcgactggacgccgccggggcagggcaatatgcaggtggtgcaggcgctggataacattgccgattcgccgctggcagacaaaatcgccgccgctaaccagcaggcgctggagcgcattatccagtcgcatccggtgctgattggttttgatcaggcgattaacgtggtgccgggcatgacgccgaaaaccattcttcacgccgggccgccgatcacctgggaaaaaatgtgcggcgcgatgaaaggcgcggtcaccggggcgttggtgttcgaagggctggcgaaagatctcgatgaggcgactgaactggcggcctccggggagatcaccttctcgccgtgccacgaacacgactgcgtgggatcgatggcgggcgttacctcggcctcgatgtttatgcacatcgtgaaaaacaaaacctacggcaacatcgcttataccaatatgagcgagcagatggcgaagattttgcgtatgggtgccaacgatcagagcgtgatcgaccgcctcaactggatgcgcgatgtgcaggggccaatgctgcgcgacgcgatgaaaattatcggtgagatcgatctgcgcttaatgctggcgcaggcgctgcatatgggcgatgagtgccataaccgcaataacgccgggacgacgctgctgattcaggcactgacgccggggatcattcaggcaggctattccgtcgagcaacagcgcgaagtgttcgagtttgtcgccagcagcgactacttctccggcccgacgtggatggcgatgtgtaaagcggcgatggatgcggcgcacggcatcgaatacagcaccgtggtcaccaccatggcgcgtaacggcgtcgagttcggcctgcgggtcagcggcctgccggggcagtggtttaccggcccagcgcagcaggtcatcggcccgatgtttgctggttataagccggaagattcggggctggatatcggcgacagcgccatcacagaaacctacggtattggcgggtttgccatggcgaccgcgcctgcaatcgtcgcactggtgggcggcacggtggaagaggctatcgatttctcccgtcagatgcgcgaaatcacccttggcgaaaaccccaacgtcaccattccgctgctcggttttatgggcgtgccgtcggcaatcgacatcacccgcgtgggtagcagcggcattctgccggtgatcaacaccgccatcgcccataaagatgcgggcgtcggcatgattggcgcgggcattgtgcatccaccattcgcctgcttcgagaaagccattctcggctggtgcgaacgttacggcgtctgacttacatgtttatgccggatgcggtgtgaacgccttatccggcctacggatggcccgagaattgtaggcctgataagcgtagcgcatcaggcagtctggcgttggtcataacctaatcaccctctgtagcggacataacaacatgaaagagcttgtggtcgttgccattggtggcaacagcattatcaaagataacgccagccagtcgattgagcatcaggcggaggcggtgaaagccgtggccgatacggtgctggaaatgctggcttccgattacgacattgtgctgacccacggtaacgggccgcaggtcgggctggatttacgccgtgcggagattgcccacgagcgcgaagggctgcccttaacgccgctggcgaactgtgtggcagatacgcagggcggcatcggctatctgatccaacaggcgctgaataaccggctggcgcgtcacggcgagaaaaaagccgtcaccgtggtaactcaggtggaagtggataaaaacgatccaggttttgcccatcccaccaagcccattggtgcattcttcagtgaaagccagcgtgacaaactacaaaaggcaaaccctgactggtgttttgttgaagatgccggacggggctatcgccgcgtggtcgcctcgccggaaccgaaacgtattgtcgaagcacccgccattaaggcgctgatccaacaaggttttgtcgtaattggcgcgggcggcggtggaattccggtagtgcgtactgaagcgggggattaccaaagcgtggacgcggttattgacaaagatctctctaccgcgctgctggcccgtgaaattcacgccgacattctggtgatcaccaccggcgtcgaaaaagtctgtatccactttggtaaaccgcagcagcaggcgctggatcgggtggatattgccaccatgactcgctatatgcaggaagggcattttccgcccggcagcatgttgccaaaaatcatcgccagcctgacgttcctggagcagggcggcaaagaagtgattatcaccacgccggaatgcctgcctgcggcgctgcgcggtgaaacgggcacccatattattaaaacgtaaggacgtaggatgaaagaaagcaatagccgccgtgaatttctgagccagagcggtaagatggtcaccgccgccgcgctgtttggtacctctgtgccgctcgcccatgcggcggtagctggcaccctaaactgcgaagcgaacaacaccatgaaaatcactgacccgcattactatctcgataacgtgctgctggaaaccggttttgactacgaaaacggtgtggcggtgcagacccgcacggcgcgccagaccgtggagattcaggacggcaaaattgtcgccctgcgcgagaacaagcagcatccggacgccacgctgccgcactatgacgctggcggtaagttgatgctacccaccactcgcgacatgcatattcatctcgacaaaaccttctacggcgggccgtggcgctcgctcaatcgtccggcaggcaccactatccaggacatgatcaaactcgagcagaaaatgctgccggagttacaaccgtatacgcaggagcgggcggaaaaactgatcgatctattgcagtcgaaaggcaccaccattgcccgcagccactgcaatatcgaaccggtttccggcctaaaaaatctgcaaaatttgcaggcggtgctggcgcggcgtcaggcgggcttcgagtgtgaaatcgtcgccttcccgcagcacggtttgctgctgtcgaaatcggaacccttaatgcgcgaagcgatgcaggcgggtgcgcattacgtcggcgggctggacccgaccagtgtcgatggcgcgatggaaaaatccctcgacaccatgtttcagattgcgctggactacgacaaaggtgtcgatattcacctgcacgaaaccactccgtcgggcgtggcagccatcaattatatggttgaaacggtagagaaaacgccgcaactgaaaggtaagctgaccatcagccacgcctttgcgctggctacgctcaacgaacaacaggtcgatgcgctggcgaatcggatggcggcgcagcaaatttctatcgcctcgacggtgccgattggcacgctgcatatgccgctcaaacagttgcacgacaaaggcgtaaaagtgatgactggcactgacagcgttatcgaccactggtcgccttatggtctgggcgacatgctggaaaaagccaatctctacgcgcagctctatattcgtcctaacgaacagaacctctcccgttcgctgtttctagccactggcgatgtattgccgctgaatgaaaaaggcgagcgtgtatggccaaaagcgcaggatgatgccagctttgtgctggtggacgcctcctgttccgccgaggcggtggcgcgtatctcgccgagaaccgcaacgttccataaagggcaactggtgtgggggagtgtggcaggttgatgcgcatttgaaacgcctgcaacggtgaattgtaagagatttaagccccagggagtggggcgggaatggtttgctaatgaatgatcctgaactttataatctcgcggcataatttccaggggattatttgagagaaatacacaaaagtgagttttaacaaaggtatttatcaggccataaatgtgacctgcttcggataaaaaagattcagtatcgaaaaaccaatgatactcttgctgatggttaccaacagtaattaagatgtgatttgtttttccgtaatcgcaaaaatattgccatgaccataaaagaaaaattctcacaaaaatatccccatgcttccttttgtacttttggcgattcagcagcgttggccgatcacctcgcaacgttgattgcgactggtgttaaaacagcttcctgtggttcgctggcgggatgtattgaagacaacgcatttccgatgattggtgagtataagattgtagaaaatagccgtggtgagcctgtatgtgttatcagagtgattggcctgcatttactgcgcttttctgatgtcaccgtggagcttgcccgtaaggaaggtgaaggtgacctcagtcttgaatattggcgtaatgaacaccgtcgttttttccaggcagaaggaagctattcaccagaaatggacgttatatttgaagaatatgcccttattgacgttgtgtagataactatttatctacgcgaaataaactcacacacataaaatatcgctaattttgtttattttgctattttttacgtaatgaatgtcacacttattgttgctgcccgttttgtccatatttataaccatatttttaatagctgcctgaaatagggctgtttattctgcataaaaatattcgaaaattcttattctctccagcgcgctaatttgggcgaacacttcctgactaccctgcaatgaggctgaaatgatgaataaacgttttgttatcaatatggtgtcttcgctgttattaggcgctgcgctaatttctgcgccgctccaggcagcggaaaaagtcgtggtgaatatttctaaagtcgatggtatgccgtggtttaatcgcatgggcgaaggtgtggttgaggcgggtaaagcctttggtgttaatgcctcacaggtggggccttcaagtactgatgctccgcaacaagttaaaattattgaggatttaatcgcccgtaaggttaatgcaattactatcgtgccaaacgatgccaacgtgctggaaccggtattcaaaaaagcgcgagatgccggaattgtggttctgaccaacgaatcccccggtcagccaagtgctaactgggatattgaaatcattgataacgaaaaatttgccgctgaatatgttgagcatatggcgaaacgcatggggggcaagggcggctatgtgatttacgtgggtagtttgaccgtgccgcagcataacttatgggctgacttgctggtgaaataccagaaagagcattacccggatatgcatgaagttacccgccgcatgccggttgccgagagtgtggatgactcacgtcgtaccacactggacctgatgaaaacctatcctgacttgaaagcggttgtctcctttggttcaaacggtccgattggcgcgggacgtgcggtgaaagagaaacgggcgaaaaataaagtcgcagtctatggcatgatgatcccttcacaggcggcatcactgattaaaagtggtgatatcaccgaagggattacttacgatccggcctctgcaggttacgcactcgcagccgtcgccagcacgttgctgaagggtgaagagatcaaacctggattagaaatgcagaatctgggtaaggccgacgtagatatggataagcgaattatccgtttccataaggtattactggtcaacaaagacaatatcgactcactttattaatccatttcttcggggcgaaagccccgattcttattgccaggggatgttatggaaactttcctttcccttcgtcatatcaacaaaacgtttcatgccacgcgagcgctgcgcgatgtttctctcgactttatgtcgggtgaagtgcactgccttgccgggcaaaacggctgtggtaaatcgacgttgattaaaattatgtccggtgtttatcgcccggatgagggagcggaaattacgcttggtgggaaaaactggtcaaagctgacacccgccgcttcggtggcgcaggggattcaggtgatttatcaggacctctctttatttcctaacctgagtgtctgggagaatatcgccgtgaatcactatcaccacggtctgtttgttaaccgccgtcgtctgcgtgaggtggcgcaggcggcaatgaccagtattaacgtcacattgccactggatacactcgtttctgagctttcaattgcccgctgtcagctggtggctatttgccgtgcactggcgcaggacgcacggttgatcgtgatggatgaaccaaccgcttcgctgacccatcaggaagtgcaagggttattacaggtggtgcatcaattgcgtgaacgcgggatctgcgtggtcttcgtcagtcatcgtctggaagaagtgatggaagtttccgaccgtatttcagtgctgaaagatggtgagctggtcgggacttttccggctgcagagatgaccacaaaacaactcggtttcctgatgaccggccaggagtttgaatatcaggtgcgagagttgtggcagggaaaatccagcaccccggtgctggaggtgcgtaatttaagtcgtcatggggaatatctaaatattaacttgcgggtggaagcgggcgaagtggtatcgattgttggcctgcttggtgcggggcgcacggaattatgtctgagtctgtttggtatgacccgaccggatgctggcgagatcctcatcaacggccagccggttacactgcatagtaaccaggacgctatccgccacggtattggttatgtttcggaagatcgcatgtcgcgcggtttggtgatggcgcaatctattgaagacaacatcattagcactgtttttcacaaggtaaaagatcgcttcggctttctgagtgaaactaaagttcgtgacctggtggacaggctaatcaaggcattgaccatcaaagtctctgatcctcatcttccggtgaatacgctttctggtggtaacgcgcagcgagtatcgatcgccaaatggctggcgattgggccacgactgttgattctcgatagcccgacagtcggtgttgatatcgccaacaaagcaggaatatacggcattatcagcgatctggcggctcatggcattgcggtattgatgatctgcgatgaaattgaagaagcgtggtatcaaagccaccggattttggtaatgcaaaaaggtcagatcacccatagcttcctgcctgacagcagttctcaggccaggattgcggaggtggtaaatggctgaactgaaaaaacgccatgaattctggctggcattactgattgtggtgctgtttgttggccttgcctggcgcagcgacgagtttctgacattcggtaatttgtacgatctcgccaataactatgccatgttgactattctcgcctgtggtttgtttgtggtgttgatttccggtggaattgatatttcgtttccagcaatgaccatcattgcgcaatacggcatggtgctgttgctgcaaaaaattggtggcaacttcgctgtcgcgtttgcactggcgggctgcatcggcattttacttggcttaattaacgccttactggttaatcgcctacgggtgccttctatcatcatcactatctcgacgctgaatattttctatggcctgctgttatggttgagtaaaggtgtgtggctgtacgactttccgccgtggtttgagcagggggttatgttgttcaagtacaccgatgctgatggctatgactatggccttggtctgccgctgatcgccatgattacggtggtgctgctaacagcgtttatcatgaatttcaccagtgtagggcgcaaaatttatgcccttggcgggaaccgcgaatcagccagtcgcatcggctttagcgtgctgaaactgcaacttttcgtctatggctatatgggattgatgtctggcgctgcgggtgtagtgcagtcgtggacggtgatgactgtcgcccccgattctcttctgggttatgagctgacagtactggctgcggtggtgcttggcggcactagtttgctcggcgggcgcggcacgttaaccggtactttgctcggcgtggtgttgttggcagtgatgcaaaacgggctaaatttattgggagtctcgtcttactggcaaacattgatcaccggcatcatcatcgttgccagcattagtgccacggcgtggagtcagcatcagaaccggagtctgctatgaaaaaatcgtggcgtaataacgttgagttttacttgatcggcctgctggtgctaactgttgccgcgttcagcattactatgccggagattttctggtcgataagtaatttccagtccgtcgcttcgcaaatgcccgtgctgggcattctggcgttggctatggcggtgaccatgctttgcggtggcattaacttgtcaattatagccactgctaacgcctgttcactggtgatggcgtgggtggcgactcagtatccaccgggtattgctacggttgtcgctacgttactggcgggcgctggcgcggcggtgataatcggtttatgtaacggcgtattgattgctggtattcgagtgtcgccaattcttgcaacgcttgggatgatgacgttgctcaaagggataaatattctggtgacaggtggtagcgccattgccaattatccctcatgggtgctgtggttgaatcatgcgcaatggttcggtattccgctaccgatgtggttgtttgccgcagtggcactggggctgtggatattgctggagaaaacgccgctcggtaaagccatttacctgattgggtctaacgaacgagcaacactttactccggcattaacactcgtcgggtgctgatttgggtttatgtcatttccgccttgctttgtgcggtagcggcatttttgatgatgtcgaaactcaactcggctaaggcctcttatggcgaatcgtacttgctggtgtcaatcctcgcggcagtactcggcggggttaatccggacggcggcagcgggcggataattggtatggtgctggcgctgtttcttctgcaaattattgaaagcggcttcaatattctcggtataagcccctacctgacgatggccttatggggaacgttgctgctctgtttcattcaggttcgcggcatgttggggctggatcgggtggtttaaatattggctatattcaatggacgcgttttgccgcgatgacatatcaggcatcgccaaatacacatagctaatcaggagtaaacacaatgaagatcaaagctattggtgcatattccgctaaacaaccacttgaaccgatggatatcacacggcgtgaaccgggaccgaatgatgtcaaaatcgaaatcgcttactgtggcgtctgccattccgatctccaccaggtccgttccgagtgggcggggacggtttacccctgcgtaccgggtcatgaaattgtggggcgtgtggtagccgttggtgatcaggtagaaaaacatgcgccgggcgatctggtcggtgtcggctgcattgtcgacagttgtaaacattgcgaagagtgtgaagacgggctggaaaactactgtgatcacatgaccggcacctataactcgccgacgccggacgaaccgggccatactctgggcggctactcacaacagatcgtcgttcatgagcgatatgttctgcgtattcgtcacccgcaagagcagctggcggcggtggctcctttgttgtgtgcagggatcaccacgtattcgccgctacgtcactggcaggccgggccgggtaaaaaagtgggcgtggtcggcatcggcggtctgggacatatggggatcaagctggcccacgcgatgggggcgcatgtggtggcatttaccacttctgaggcaaaacgcgaagcggcaaaagccctgggggccgatgaagttgttaactcacgcaatgccgatgagatggcggctcatctgaagagtttcgatttcattttgaatacagtagctgcgccacataatctcgacgattttaccaccttgctgaagcgtgatggcaccatgacgctggttggtgcgcctgcgacaccgcataaatcgccggaagttttcaacctgatcatgaaacgccgtgcgatagccggttctatgattggcggcattccagaaactcaggagatgctcgatttttgcgccgaacatggcatcgtggctgatatagagatgattcgggccgatcaaattaatgaagcctatgagcgaatgctgcgtggtgatgtgaaatatcgttttgttatcgataatcgcacactaacagactgaaaaaattaataaatacgctgtggtttaacatattaacttcgctctccacttaactttttagttaaggagagcgaaataatatcaaagtagcagtaaaacctataacgtaaattcaaattgttaaattaactccctccagtacacaatacttcacacgttagttatgagcgatttctgatagtgcctggtttaatcagagctttattatctgcgacgtttattttatttaagagagatcgcgatgatatcattaaaagctccgcacaataatttgatgccatatacgcaacaaagcatacttaatacggttaaaaacaatcagttaccagaggatatcaaaagctccctggtttcctgtgtcgatatattcaaggttttgattaaacaatattatgattatccttatgattgtcgtgatgatttagtcgatgacgacaaactcattcatctcatggctgccgtacgagactgtgagtggtcagacgataacgcactcaccataaatgtgcagtttaatgatttccctggattttatgactggatggattaccctgatcacccggttaagtttgtttttcgcatacttgaaaatcaaaaagggacagtttgggtatatgaccaggatgatgcgtttcttgatattaaagcaaatgtgcaggctggacgctttaccgggcttaagaaattagttcagtttatcgattcagtgcgaacagattgcaaatgtattcttcttgaacaccatatgcctttgctgagacttttccctaaagggaaagagtgtatgcatgtggaaaaatggcttcgcgaaatgtcgtctattccggagacagacgcgcccattaagcaggcgcttgcgcatggattattattacacttaaaaaatatctaccctgtttttcctgaatcactggtgatgttattgctctctgttctggacgtaaaaacatacagagatgacgcacgattaaatgaatggatatcgaatagagtgcaggaattaggtgacagatattatcctgtaaataagcacgttaaaatccgctacactctttagttcagaaagggttccacctgcaagttgttattccaccagagagtgaatcgcaaagcaggtaatcatttcatctgtatatccgtatgctaaatggcattccaccgccttttcgccgatattttgttgtgatcagcgacgcttcgcttaaaaaagcaccagcagtggtttcgcagctatgtggtgtataaaaaatgatctcatgcagatgttttgtgaatgtgtgggttgacattcatatgaaaaaaatcataattccatcatgtttgtatggggtcttttctgtaccttacgcatcgcactcaagcctgacagaaaatatgctgtaaggctcatatcaaaaaccgccattagctcatcaggaagagcagacgacaaccaggattgttgtatggtacggggttcgaggcctcgatggcggtccaacttttcaaaactcttctgaatcagatccccttattatcatccctgcaaagtggaacattgccattgtttggctattcaggacggggcagaccaatgaaaaaagcccacacaggggagagtgggctgaaatgggaagctaaagactcaagtaaacttatcggaaataaggaccacgcattacgggggctatcatcgccgatggccgggattcggcaaatcaggttgattacgtagagagtaaattatctgctcaccgctgcgtcaccccttcgtaaatcaggcgtagcgcgaatacaccaataattgcaccaataacccgactggcaacgcgttgcatacgcccataagcacgacgcacagcgggcaaagaaaacgcctgactaagaaaaactcgccagataattgatgcgagcacaatccccgcccaggccattaaacgtgcccatgttggtgtttcggcatttaatgttactgagaaaatactaataaaaaataaaacggtttgcgggttagagagatcggtaattaatccgcggcgaaaaaagacataccagggggcgctaatcggttgttgtagtgtgctcatttgcggtgttgactggcggcgcatgctgcaccacgcaaaccataagagataagcgccgccgacgattctgataagcgaaaaaatctcctcacactgcgtaattagtgttgcaagaccaaacaaacccaacccggaataaaatgcatcgcccagcgccacccccagcccggtcagcacacctgcgcgtcgaccggaagccaggctggtttgtactaccacaaagagattggctcccggattaaaaaaagtaatcacgaacagtcctacggtcaggtaaacggcgtgcaaaggatccatagtgatttcatccataaataagtgaagtaacttcatcatatttctaccaaaaataatcgggtgcgaaagagatcacaaagtgtcttatttccggttactggcgtttatgccctgactgaactaattattaatcaacccaataatgtgggtgggtgatagtgtgataacaactctggagccgtaatatgaaaataatctctaaaatgttagtcggtgcgttagcgtttgccgttaccaatgtctatgccgctgaattgatgaccaaagcggaatttgaaaaagttgaatcgcagtatgaaaaaataggtgatatttcaaccagtaatgaaatgtcgaccgcagatgcgaaagaggatttgatcaaaaaagcggatgaaaaaggggctgatgtgttggtactgacctctggtcaaactgacaataagatccacggcacggcaaatatttataagaagaagtaattctgaaacctatgtaaacatccccgatgcgtaaatttatcggtgatcatcatctattgaaatttatgccggataaagcgttcgcgctgcattcggcagttcagtttttcagccgccgccagaacgtcgtccggcttatgcctaaataattcgccgctgctgttttatcgcctttaaatttctccagtgcctgttgtggtgtcagtaagcgtggagcgggaattttcgccgactcgcgcgccagctccggcagtagcagttgcataaactgcggcgttaaatccggcgtcggttccacacttaaaaacagcgccagtcgttccatcatattgcgcagttcacgaatattgcctggccagtcgtagtgcaccagcacggtttcgcttgcctgtaatccctggcgtaatgcggcagaaaacggggcggagagcgccgccagagacactttcaaaaagctttccgccagcggaagaatatccgccacccgctcgcgcagtggtggcaattgcagacgcaaaatactcagccgataaaacagatcacggcgaaactgcccttgccgcatatcttcttccagattgcagtgagtggcgctaatgacccgcacatccaccggaacaggctgatgcccgccgacgcgagtaacctctttttcttccagcacccgtaacaggcgagtctgcaaaggtagcggcatttcgccaatctcatccagaaacagcgtaccgccgtgggcaatttcgaacagcccggcgcgacctccgcgtcgcgagccggtaaacgccccttcctcatagccaaacagctccgcttccagcagcgattcggctatcgccccgcagttgacggcaacaaacggatgcgactttttgccctgtcgcgcatcgtggcgggcaaaatattcccgatgaatcgcctgggccgccagctctttgcccgtccccgtttccccttcaatcaacaccgccgcactggagcgggcatacagcaaaatagtctgccgtacttgttccatctgtggtgattgaccgagcatatcgcccagcacgtaacgagttctcagggcgttgcgggtggcatcgtgagtgttatggcgtaacgacatgcgcgtcatatccagcgcatcgctgaacgcctggcgcacggtgacggcggaatagataaaaattccggtcattccggcttcttctgccagatcggtaatcagccccgcaccgaccaccgcttcggtgccgttagctttgagctcgttaatctgcccgcgggcgtcttcttcggtaatgtagctacgttgatcgaggcgcaaattaaaggttttttgaaacgccaccagtgccggaatagtttcctgataagtgacaacgccgatagaagaggtgagctttccggcttttgccagtgcctgtaacacatcgtagccgctcggtttaatcaaaataactggcactgacaggcggcttttcaggtacgcgccgttagagccagcggcgatgacggcgtcgcagcgttcgtttgccagtttcttgcggatataggtcactgctttttcaaagccaagctggataggggtaatgttcgccaggtgatcaaactcgaggctgatatcgcgaaacagctcgaacaggcgcgttacagataccgtccagataaccggtttgtcgtcattaagccgtggtggatgtgccatagcgcaccgcaaagttaagaaaccgaatattgggtttagtcttgtttcataattgttgcaatgaaacgcggtgaaacattgcctgaaacgttaactgaaacgcatatttgcggattagttcatgacgttatctctaacaaattgaaattaaacatttaattttattaaggcaattgtggcacaccccttgctttgttttattaacgaaaataacaagttgataacaaaggatgggctatgtctctacactctccaggtaaagcgtttcgcgctgcactgactaaagaaaatccattgcagattgttggcaccatcaacgctaatcatgcgctgttggcgcagcgtgccggatatcaggcaatttatctctccggcggtggcgtggcggcagggtcgctggggctgcccgatctcggtatttctacccttgatgatgtgctgacagatattcgccgtatcaccgacgtttgttcgctgccactgctggtggatgcggatatcggttttggttcttcggcctttaacgtggcgcgtacggtgaaatcgatgattaaagccggtgcggcaggattgcatattgaagatcaggttggtgcgaaacgctgcggtcatcgcccgaacaaagcgatcgtctcgaaagaggagatggtggatcggatccgcgcggcggtggatgcgaaaaccgatcctgattttgtgatcatggcgcgcaccgatgcgctggcggtagaggggctggatgcggcgatcgagcgtgcacaggcctatgttgaagcgggtgccgagatgttgttcccggaggcgattaccgaactcgccatgtaccgccagtttgccgatgcggtgcaggtgccgatcctcgccaacattaccgaatttggcgcaacaccgctgtttaccaccgacgaattacgcagcgcccatgtcgcaatggcgctgtacccactttcagcgttccgcgccatgaaccgcgccgctgagcatgtctacaacgtcctgcgccaggaaggcacgcagaaaagcgtcatcgataccatgcaaacccgcaacgagctgtacgaaagcatcaactactaccagtacgaagcgaagctcgacgacctgtttgcccgtagccaggtgaaataaaacacaacgaaaaatatctcgaccctacaaatgacgaggacaatatgagcgacacaacgatcctgcaaaacagtacccatgtcattaaaccgaaaaaatcggtagcactttctggcgttccggcgggcaatacggcgctctgcaccgtgggtaaaagtggcaatgacctgcattaccgtggctacgatattcttgatctggcggaacattgcgaatttgaagaagtggcgcacctgctgatccacggcaaactgccgacccgtgacgaactcgccgcttacaaaacgaaactgaaagccctgcgtggtttaccagctaatgtgcgtaccgtgctggaagccttaccggcggcgtcgcacccgatggatgtcatgcgcaccggcgtttccgcgctcggctgcatactgccagaaaaagaggggcacactgtctctggcgcgcgggatattgccgacaaactgctggcatcacttagctcgattctcctttattggtatcactacagtcacaacggcgaacgcatccagccggaaaccgatgacgactccatcggcggtcacttcctgcatctgctgcacggcgaaaagccatcgcaaagctgggaaaaggcgatgcatatctcgctggtgctgtacgccgaacacgagtttaacgcctccacctttaccagtcgggtgattgcgggcaccggctctgatatgtattccgcgattattggcgcgattggcgcactgcgcgggccaaaacacggcggggcgaatgaagtgtcgctggagatccagcaacgctacgaaacgccggacgaagccgaagcagatatccgcaagcgcgtggaaaacaaagaagtggtcattggttttggtcatccggtttacaccatcgctgacccgcgccaccaggtgattaaacgtgtggcgaagcagctctcgcaggaaggcggctcgctgaagatgtacaacatcgccgatcgcctggaaacggtgatgtgggagagcaaaaagatgttccccaatctcgactggttctctgctgtttcctacaacatgatgggcgttcccaccgagatgttcacaccactgtttgttatcgcccgcgtcaccggctgggcggcgcacattatcgaacaacgtcaggacaacaaaattatccgtccttccgccaattatgttggaccggaagaccgcccgtttgtcgcgctggataagcgccagtaaacctctacgaataacaataaggaaacgtacccaatgtcagctcaaatcaacaacatccgcccggaatttgatcgtgaaatcgttgatatcgtcgattacgtcatgaactacgaaatcagctctaaagtggcctacgacaccgcacattactgcctgctcgacacgctcggctgcggtctggaagctctcgaatacccggcctgtaaaaaactgctggggccaattgttcccggcaccgtcgtacccaacggcgtgcgcgtccccggaactcagttccagctcgaccccgtccaggcggcatttaacatcggcgcgatgatccgctggctcgatttcaacgatacctggctggcggcggagtggggccatccttccgacaacctcggcggcattctggcaacggcggactggctttcgcgcaacgcggtcgccagcggcaaagcgccgttgaccatgaaacaggtgctgaccgcaatgatcaaagcccatgaaattcagggctgcatcgcgctggaaaactcctttaaccgcgtcggcctcgaccacgttctgttagtgaaagtggcttccaccgccgtggtcgccgaaatgctcggcctgacccgcgaggaaattctcaacgccgtttcgctggcgtgggtggacggtcagtcgctgcgcacctatcgccatgcgccgaacaccggcacgcgtaaatcctgggcggcgggcgatgccacttcccgcgcggtacgtctggcactgatggcgaaaacgggcgaaatgggttacccgtcagccctgaccgcgccggtatggggcttctacgacgtctcctttaaaggtgaatcgttccgcttccagcgtccgtacggttcttacgtcatggagaatgtgctgttcaaaatctccttcccggcggagttccactcccagacggcagttgaagcggcgatgacgctctatgaacagatgcaggcagcaggcaagacggcggcggatatcgaaaaagtgaccattcgcacccacgaagcctgtattcgcatcatcgacaaaaaggggccgctcaataacccggctgaccgcgaccactgcattcagtacatggtggcgatcccgctgttattcgggcgcttaacggcggcagattacgaggacaacgttgcgcaagataaacgcatcgacgccctgcgcgagaagatcaattgctttgaagatccggcatttaccgctgactaccacgacccggaaaaacgcgccatcgccaatgccattacccttgagttcaccgacggcacacgatttgaagaagtggtggtggagtaccccattggtcatgctcgccgccgtcaggatggtattccgaaactggtcgataaattcaaaatcaatctcgcgcgccagttcccgactcgccaacagcagcgcattctggaggtttctctcgacagaactcgcctggaacagatgccggtcaatgagtatctcgacctgtacgtcatttaagtaaacggcggtaaggcgtaagttcaacaggagagcattatgtcttttagcgaattttatcagcgttcgattaacgaaccggagcagttctgggccgagcaggcccggcgtattgactggcagacgccctttacgcaaacgctcgaccacagcaatccgccgtttgcccgttggttttgtgaaggccgaaccaatttgtgccacaacgctatcgaccgctggctggagaaacagccagaggcactggcattgattgccgtctcttcggaaacagaagaagagcgcacctttacctttcgccagctgcatgacgaagtgaacgcggtggcctcaatgttgcgctcactgggcgtgcagcgcggcgatcgggtgctggtgtatatgccgatgattgccgaagcgcatattactctgctggcctgcgcgcgcattggtgctattcactcggtggtgtttggtggatttgcctcgcacagcgtggcggcgcgaattgatgacgctaaaccggtgctgattgtctcggctgatgccggagcgcgcggtggcaaaatcattccctataaaaaattgctcgacgatgcgataagtcaggcgcagcaccagccacgccatgttttgctggtggatcgcgggctggcgaaaatggcgcgcgtcagcgggcgggatgtcgatttcgcgtcgttgcgccatcaacacatcggcgcgcgggtaccggtggcgtggctggaatccaacgaaacctcctgcattctctacacttccggcacgaccggcaaacctaaaggcgtgcagcgtgacgtcggcggatatgcggtggcgctggcgacctcgatggacaccatttttggcggcaaagcgggcagcgtgttcttttgcgcatcggatatcggctgggtggtggggcattcgtatatcgtttacgcgccgctgctggcggggatggcgactatcgtttacgaaggattgccgacctggccggactgcggcgtgtggtggaaaatcgtcgagaaatatcaggttagccggatgttctcagcgccgaccgccattcgcgtgctgaaaaattccctaccgctgaaattcgcaaacacgatctctcgtcgctggaagtgctctatctggctggagaaccgctggacgagccgaccgccagttgggtgagcaatacgctggatgtgccggtcatcgacaactactggcagaccgaatccggctggccgattatggcgattgctcgcggtctggacgacaggccgacgcgtctgggaagccccggcgtgccgatgtatggctataacgtgcagttgcttaatgaagtcaccggcgaaccgtgtggcgtcaacgagaaagggatgctggtggtggaagggccgctgccgccgggctgtattcagaccatctggggcgacgacgaccgctttgtgaagacttactggtcgctgttttcccgcccggtgtacgccacctttgactggggcatccgtgacgctgacggttatcactttattctcgggcgcactgacgatgtaattaacgttgccgggcatcgtctgggcacgcgcgagattgaagagagtatctccagccatccgggcgttgccgaagtggcggtggttggggtgaaagatgcgctgaaagggcaggtggcggtggcgtttgtcattccgaaagagagcgatagtctggaagatcgtgatgtggcgcattcgcaagagaaggcgattatggcgctggtggacagccagattggcaactttggtcgcccggcgcacgtctggtttgtctcgcaattgccgaaaacgcgatccggaaaaatgctgcgccgcacgatccaggcaatttgcgaaggacgcgatcctggggatctgacgaccattgatgatcctgcgtcattggatcagatccgccaggcgatggaagagtaaggtattgtcggatgcgtcgcgtgccgcatccgacatcatgcgccgatgcctgatgcgacgcttaccgcgtcttattatgcctacaggcctgaaccgtaggtcggataaggcgctcgcgtcgcatccgacatccccgcgccgatgcctgatgcgacgcttaccgcgtcttatcatgcctacaggtctgaaccgtaggtcggataaggcgctcgcgccgcatccgacaccatgctcagatgcctgatgcgacgctgacgcgtcttatcaggccttgtattatccctccagtgcagagaaaatcggccagttttctctgcctgcagtccgcatgccgtatcgggccttgggttctaacctgttgcgtagatttatgcagcggactgcctttctcccaaagtgataaaccggacagtatcatggaccggttttcccggtaatccgtatttgcaaggttggtttcactatggaacatgaacttcattatatcggtatcgacaccgctaaagagaaactggatgtcgatgtgttgcgtcctgatggtcgtcatcgcaccaaaaaattcgctaacaccactaaagggcacgatgagctggtgagctggctgaaaggtcacaagattgaccatgcgcatatctgcatcgaagcgaccggcacctatatggaacctgtcgctgagtgcctttacgatgctggctacatagtgtcagtcattaatcctgcgctgggtaaagctttcgctcagagtgaaggactgcgtaacaagactgataccgtggatgcgcgcatgctggcagagttctgtcgtcagaagcgccctgcagcctgggaagcgcctcacccgcttgaacgcgcgttgcgtgccctggtagtccgccaccaggcgctgacagatatgcacacgcaggaactgaatcgcactgaaacggcgcgggaagtccagagaccgagcattgatgctcaccttctgtggcttgaagcagagctgaagcgtcttgagaagcagataaaagacctgacagacgatgatccggatatgaaacaccgcaggaaactgctggaaagcatcccgggtatcggagagaaaacatctgcggtattgctggcttatatcggtctgaaggaccgcttcgcccatgccagacagttcgccgcttttgcgggtctgacaccacggcgttatgaatcaggtagcagtgtgagaggggcgagccggatgagtaaggccggacatgtgtcgcttcgcagggcgttgtatatgcccgcaatggtagccaccagtaagactgagtggggacgggcgttccgcgaccgtctggcggctaatg

SEQ ID NO: 479 - DNA, 23521 bp, Escherichia coli
gcgrmkaawggraagraaavgaaaggtgattctcggcgcgatgatgcgcaagctggcacaggtggcgtatggagtgctgaagtcaggcgtgccgttcgatgcgtcacggcataatccggtagcggcgtaaaaatcgcggaagggatgaaaaaaacagcgcctgacggcgctgtgtctggcatgcctgcaatccgggaaaccggaccaggaaaaaacttgcaggccttatcaggcctacccactgtttttacaccgataatttttcccccacctttttgcactcattcatataaaaaatatatttccccacgaaaacgattgctttttatcttcagatgaatagaatgcggcggattttttgggtttcaaacagcaaaaagggggaatttcgtgtcgcaagataacaactttagccaggggccagtcccgcagtcggcgcggaaaggggtattggcattgacgttcgtcatgctgggattaaccttcttttccgccagtatgtggaccggcggcactctcggaaccggtcttagctatcatgatttcttcctcgcagttctcatcggcaatcttctcctcggtatttacacttcatttcttggttacattggcgcaaaaaccggcctgaccactcatcttcttgctcgcttctcgtttggtgttaaaggctcatggctgccttcactgctgctgggcggcacccaggttggctggtttggcgttggcgtggcgatgtttgctattccggtgggcaaggcaaccgggctggatattaatttgctgattgccgtttccggtttactgatgaccgtcaccgtcttctttggcatttcggcgctgacggttctttcggtgattgcggttccggctatcgcctgccttggcggctattccgtgtggctggctgttaacggcatgggcggcctggacgccttaaaagcggtcgttcccgcacaaccgttagatttcaatgtcgcgctggcgctggttgtggggtcatttatcagtgcgggtacgctcaccgctgactttgtccgctttggtcgcaatgccaaactggcggtgctggtggcgatggtggcctttttcctcggcaactcgttgatgtttattttcggtgcagcgggcgctgcggcactggggatggcggatatctctgatgtgatgattgctcagggcctgctgttgcctgcgattgtggtgctggggctaaatatctggaccaccaacgataacgcgctctatgcgtcgggtttaggtttcgccaacattaccgggatgtcgagcaaaaccctttcggtaatcaacggtattatcggtacggtctgcgcattatggctgtataacaattttgtcggctggttgaccttcctttcggcagctattcctccagtgggtggcgtgatcatcgccgactatctgatgaaccgtcgccgctatgagcactttgcgaccacgcgtatgatgagtgtcaattgggtggcgattctggcggtcgccttggggattgctgcaggccactggttaccgggaattgttccggtcaacgcggtattaggtggcgcgctgagctatctgatccttaacccgattttgaatcgtaaaacgacagcagcaatgacgcatgtggaggctaacagtgtcgaataacgctttacaaacaattattaacgcccggttaccaggcgaagaggggctgtggcagattcatctgcaggacggaaaaatcagcgccattgatgcgcaatccggcgtgatgcccataactgaaaacagcctggatgccgaacaaggtttagttataccgccgtttgtggagccgcatattcacctggacaccacgcaaaccgccggacaaccgaactggaatcagtccggcacgctgtttgaaggcattgaacgctgggccgaacgcaaagcgttattaacccatgacgatgtgaaacaacgcgcctggcaaacgctgaaatggcagattgccaacggcattcagcatgtgcgtacccatgtcgatgtttcggatgcaacgctgactgcgctgaaagcaatgctggaagtgaagcaggaagtcgcgccgtggattgatctgcaaatcgtcgccttcccgcaggaagggattttgtcgtatcccaacggtgaagcgttgctggaagaggcgttacgcttaggggcagatgtagtgggggcgattccgcattttgaatttacccgtgaatacggcgtggagtcgctgcataaaaccttcgccctggcgcaaaaatacgaccgtctcatcgacgttcactgtgatgagatcgatgacgagcagtcgcgctttgtcgaaaccgttgctgccctggcgcaccgtgaaggcatgggcgcgcgagtcaccgccagccacaccacggcaatgcactcctataacggggcgtatacctcacgcctgttccgcttgctgaaaatgtccggtattaactttgtcgccaacccgctggtcaatattcatctgcaaggacgtttcgatacgtatccaaaacgtcgcggcatcacgcgcgttaaagagatgctggagtccggcattaacgtctgctttggtcacgatgatgtcttcgatccgtggtatccgctgggaacggcgaatatgctgcaagtgctgcatatggggctgcatgtttgccagttgatgggctacgggcagattaacgatggcctgaatttaatcacccaccacagtgccagaacgttgaatttgcaggattacggcattgccgccggaaacagcgccaacctgattatcctgccggctgaaaatgggtttgatgcgctgcgccgtcaggttccggtacgttattcggtacgtggcggcaaggtgattgccagcacacaaccggcacaaaccaccgtatatctggagcagccagaagccatcgattacaaacggtaatttcctctgtgttgaagagccactgacctgtgtcagtggctaccgtgattcattctcgccaacatccgcacattcctccaacgccatgtgcaaaaatgccttcgcggcggctgtctgccagctatttttccgccgcaacaaaaccgccgttctctccagtagtggcggggcaagagaaatcgctttaagcccgtcatgttgtgtggcaatcgctgctggtaacaatgtggaaagggaagtgcggcgaatcagctccagaaccgcgctaattgagttcgcctcaatgaccacctgtggatgtagccccgctttctcgcagtagtggtcaatttgctctctggtggcaaattccgcgctgagcaggaccagtttttcatcatgcaagcgactcaacgccacctgttcacaggcagccagcggatgatgtttcgccaccaccaacgctaaactttctgtcagtaaaggaattgcctccagctccggcgaatgcacaggcgcgaaggcaatcccaacgtccagctcgtcgcgacaaagcagatcttcgattttctcctgcgacatttcctgtagctggagcgtgatgccggggtagcgcgcatagaaatccgccattaaggggccgataaagtagctcgtaaaggtgggggtgacggcgatacgcagcgatcctcgcgtcagagcggcaacatcatgaatcgcccgtttacccgctcccagttcatgtaacgcccggctggcgtactgtcgccagacttctcctgcatcggtgagacgaatcgttcgcccgctacggtcaaacagcggcacgcccaaactctcctctaactggcgaatctgctgggaaagcgcaggctgggagacgtgcaacgcactggcggcacgggtgaagctgccatgttcagccacggcaagaaagtaattgatatgtcgagagagcattcgccaacctataagtaaatccaatagaactcatcataaatgagacttttaccttatgacaatcggcgagtagtctgcctctcattccagagacagacagaggttaacggtgaaagagattattgatggattccttaaattccagcgcgaggcatttccgaagcgggaagccttgtttaaacagctggcgacacagcaaagcccgcgcacactttttatctcctgctccgacagccgtctggtccctgagctggtgacgcaacgtgagcctggcgatctgttcgttattcgcaacgcgggcaatatcgtcccttcctacgggccggaacccggtggcgtttctgcttcggtggagtatgccgtcgctgcgcttcgggtatctgacattgtgatttgtggtcattccaactgtggcgcgatgaccgccattgccagctgtcagtgcatggaccatatgcctgccgtctcccactggctgcgttatgccgattcagcccgcgtcgttaatgaggcgcgcccgcattccgatttaccgtcaaaagctgcggcgatggtacgtgaaaacgtcattgctcagttggctaatttgcaaactcatccatcggtgcgcctggcgctcgaagaggggcggatcgccctgcacggctgggtctacgacattgaaagcggcagcatcgcagcttttgacggcgcaacccgccagtttgtgccactggccgctaatcctcgcgtttgtgccataccgctacgccaaccgaccgcagcgtaaccttatttttaaaccatcaggagatccaccatgattcagtcacaaattaaccgcaatattcgtcttgatcttgccgatgccattttgctcagcaaagctaaaaaagatctctcatttgccgagattgccgacggtaccggtctggcagaagccttcgtaaccgcggctttgctggggcagcaagcgcttcctgccgacgccgcccgcctggtcggggcgaagctggatctcgacgaagacgccattctactgttgcagatgattccactgcgtggctgcattgatgaccgtattccaaccgacccaacgatgtatcgtttctatgaaatgttgcaggtgtacggcacaaccctgaaagcgttggttcatgagaagtttggcgatggcattatcagcgcgattaacttcaaactcgacgttaagaaagtggcggacccggaaggtggcgaacgtgcggtcattaccttagatggtaaatatctgccgaccaagccgttctgacagccatgcgcaatcatcaaaagacgttcacgatgctgctggttctggtgctgattggtcttaatatgcgaccactgctcacctccgtcgggccactgctaccgcaattgcgccaggcgagcggaatgagctttagcgtggctgccctgttgaccgctcttccggtggtcaccatgggcgggctggcgctggccggaagctggcttcatcagcatgtcagcgaacgtcgcagtgtcgccatcagtctgttgctgattgccgtcggtgcattgatgcgtgagctttacccccaaagtgcgctgctgcttagcagcgcactgcttggtggggtggggatcggcatcattcaggcggtgatgccttcggtgattaaacggcggtttcagcagcgcacgccactggtgatggggctgtggtccgcggctctgatgggcggcggtggacttggtgccgccataacgccctggttagttcaacatagcgaaacctggtatcaaacactcgcctggtgggcgctgcctgccgttgttgcgctctttgcctggtggtggcaaagcacccgcgaggtcgcctcttcccacaagacaacaaccactccggttcgcgtggttttcactcctcgcgcgtggacgctgggtgtttactttggtctgattaacggtggttacgccagcctgattgcctggttacccgccttctatattgagattggtgccagcgcgcagtacagcggttccttgctggcattgatgacgcttgggcaagccgcaggagctttgctgatgcctgctatggctcgccatcaggatcggcgcaaactgttaatgctggcgctggtgttacaactggtggggttctgcggctttatctggctgccgatgcaattgccggtattgtgggcgatggtgtgtgggttaggtctgggcggcgcgtttccgctctgtttgctgctggcgctcgatcactctgcgcaaccggctattgctggcaagctggtggcgtttatgcaggggatcggttttatcatcgccgggcttgccccgtggttttctggcgtgctgcgtagtatcagcggcaattacctgatggactgggcgtttcatgcgctgtgcgtcgttgggctgatgatcataaccctgcgttttgcaccagcacgttttccgcagctgtgggtcaaagaggcatgatgcgacgcttgttcctgcgctttgttcatgccggatgcggctaatgtagatcgctgaacttgtaggcctgataagcgcagcgtatcaggcaatttttataatttaaactgacgattcaactttataatctttgaaataatagtgcttatcccggtcgtttatttcgcgaataacccgacaaggaacgccagccgccacgacgtttggtggaatgtcttttgtgacgatactacccgcgccaataacagaattatccccgatggtgacgcctggattaataaccacatgacttccgatccagacgttattgccaatcgttatcggaaaagagtacatctcgccgttttttctcaattcatggtgtacagggtgtcccgtaacggaaagagtaacgttgggtgcaatcagtacgttatcaccgattattaccgtgtagtcatcgacaatggttaaattgaaatttgcataaaaattgcggcctatatggatgttggaaccgtaagagaaatagacaggcggttctacccaggcgttttcccctaccgtggcaaacatttctttaatcaggctttctcttttttcaacttctgatggatgcgagtgattaaactcatacattaacgttttcccacgaagtcttttttccggtaagccttcgcacatatcggtaaatagcttgcctgctcttattctttcggtcattggcatgttcaatgcgatcactccgttatgatatgttggtcggataaggcgctcgcgccgcatccgacattaattgcttaagcgacttcattcacctgatgacgcagcagggaaagcgggccggggccgctaagcgtgaacacggaaattaaggtgaagcccagcgccaccagacccagcaccagataagcgccctggaaaccgatgctttcatacatattgcccgccagtacagacataaaaatcatcgccagttgcttaaagaagcagaaacagaccagataaatcgtcgctgaaaaacgcacttcaaactggctggtaatatatttaaagcagcccaccagcaggaacggtacttcaaacatatgcagcgttttcagaataaccacttccagcgctgaggtggcgaacgatgagccaataatacgtacagacataatagtgccagccagcagcagggcgtttttcccaccgatgcgattaatgatcagtggcgcaaagaacataatcgaggcgttaagtaattcgcccattgtcgttacgtagccaaatacccgcgtaccctgttcaccggtagcaaagaacgaagtaaagaaattagcaaactgttggtcaaaaacatcgtaggtgcaggaaacgccaataacatacagtgacaaaaaccacagttttggctgtctgaacagttccagcgccagcttaaggctaaatgccgaatggttggcacctaccgcattggcaaccgtgacggaagagggcgcatccgttttggcgaaaaagagtaaaacggcgaggatgagtgcacagccagaacccagccagaaaacaaactgattattgatggtgaacatgatgccgacaatcgaggcacacagcgcccagccaacacagccaaacatccgcgcgcgaccaaattcgaaattactgcgacggctgactttctcaataaatgcctctactgctggcgcaccggcgttaaaacagaaaccaagataaataccaccaacaatcgaccctactaaaatgttgtattgtaacagcgggccgaagataaaaataaagaacggcgcaaacatcactaacatgccggtaataatccacagcaggtatttgcgcagcccgagtttgtcagaaagcagaccaaacagcggttggaataatagcgagaacagagaaatagcggcaaaaataatacccgtatcacttttgctgatatggttgatgtcatgtagccaaatcgggaaaaacgggaagtaggctcccatgataaaaaaataaaagaaaaagaataaaccgaacatccaaaagtttgtgttttttaaatagtacataatggattgccttacgcgaaatacgggcagacatggcctgcccggttattattatttttgacaccagagcaactggtaatggtagcgaccggcgctaagctggaattccgccgacactgacgggctccaggagtcgtcgccaccaatccccatatggaaaccgtcgatattcagccatgtgccttcttccgcgtgcagcagatggcgatggctggtttccatcagttgttgttggctgtagcgactgatattgaactggaagtcgccgcgccactggtgtgggccataattcaattcgcgcgtcccgcagcgcagaccgttttcgctcgggaagacgtacggggtatacatgtctgacaatggcagatcccagcggtcaaaacaggcggcagtaaggcggtcgggatagttttcttgcggccctaatccgagccagtttacccgctctgctacctgcgccagctggcaggtcaggccaatccgcgccggatgtggcgtattgctcgccacttcaacatcaacggtaatcgccatttgaccactaccatcaatccggtaggttttccggctgataaataaggttttcccctgatactgccacgcgtggacagtggtaatcagcaccgcgtcggcaagtgtatctgccgtgcactgcaacaacgccgcttcggcctggtaatggcccgccgccttccagcgttcgacccaggcgttcgggtcaatgcgggtcgcttcacttacgccaatgtcgttatccagcggcgcgcgggtgaactgatcgcgcagcggcgtcagcagttgttttttatcgccaatccacatctgtgaaagaaagcctgactggcggttaaattgccaacgcttattacccagctcgatgcaaaaatccatttcgctggtggtcagatgcgggatggcgtgggacgcggcggggagtgtcacgctgaggttttccgccagacgccactgctgccaggcgctgatgtgtccggcttctgaccatgcggtcgcgttcggttgcactacgtgtacagtaagccagagttgtccggcgctctccggctgcggtagttcaggcagttcaatcaactgtttaccttgtggagcgacatccagaggcacttcaccgcttgccagcggcttgccatccagcgccaccatccagtgcaggagctcgttatcgctatgacggaacaggtattcgctggtcacttcgatggtttgcccggataaacggaactggaaaaactgctgctggtattttgcttccgtcagcgccggatgcggcgtgcggtcggcaaagaccagaccgttcatgcagaactggcgatcgttcggcgtatcgccaaaatcaccgccgtaagccaaccacgggttgccgttttcatcatatttaatcagcgactgatccacccagtcccagacgaagccgccctgtaaacggggatactgacgaaacgcctgccagtatttagcgaaaccgccaagactgttacccattgcgtgggcatattcgcaaaggatcagtgggcgcagttctccaggcagcgaaagccattttttgatggaccatttcggcaccgccgggaagggttggtcttcatccacgcgcgcgtacatcgggcaaataatatcggttgcgaaggtgtcggctccgccgccttcatactgcaccgggcgggaaggatcgacagatttgatccagcgatacagcgcgtcgtgattagcgccgtggcctgattcattccccagcgaccagatgatcacactcgggtgattacgatcgcgctgcaccattcgcgttacgcgttcgctcatcgccggtagccagcgcggatcatcggtcagacgattcattggcaccatgccgtgggtttcaatattggcttcatccaccacatacaggccgtagcggtcgcacagcgtgtaccacagcggatggttcggataatgcgaacagcgcacggcgttaaagttgttctgcttcatcagcaggatatcctgcaccatcgtctgctcatccatgacctgaccatgcagaggatgatgctcgtgacggttaacgcctcgaatcagcaacggcttgccgttcagcagcagcagaccattttcaatccgcacctcgcggaaaccgacatcgcaggcttctgcttcaatcagcgtgccgtcggcggtgtgcagttcaaccaccgcacgatagagattcgggatttcggcgctccacagtttcgggttttcgacgttcagacgtagtgtgacgcgatcggcataactaccacgctcatcgataatttcaccgccgaaaggcgcggtgccgctggcgacctgcgtttcaccctgccataaagaaactgttacccgtaggtagtcacgcaactcgccgcacatctgaacttcagcctccagtacagcgcggctgaaatcatcattaaagcgagtggcaacatggaaatcgctgatttgtgtagtcggtttatgcagcaacgagacgtcacggaaaatgccgctcatccgccacatatcctgatcttccagataactgccgtcactccagcgcagcaccatcaccgcgaggcggttttctccggcgcgtaaaaatgcgctcaggtcaaattcagacggcaaacgactgtcctgaccgtaaccgacccagcgaccgttgcaccacagatgaaacgccgagttaacgccatcaaaaataattcgcgtctggccttcctgtagccagctttcatcaacattaaatgtgagcgagtaacaacctgtcggattctccgtgggaacaaacggcggattgaccgtaatgggataggtcacgttggtgtagatgggcgcatcgtaaccgtgcatctgccagtttgaggggacgacgacagtatcggcctcaggaagatcgcactccagccagctttccggcaccgcttctggtgccggaaaccaggcaaagcgccattcgccattcaggctgcgcaactgttgggaagggcgatcggtgcgggcctcttcgctattacgcagctggcgaaagggggatgtgctgcaaggcgattaagttgggtaacgccagggttttcccagtcacgacgttgtaaaacgacggccagtgaatccgtaatcatggtcatagctgtttcctgtgtgaaattgttatccgctcacaatttcacacaacatacgagccggaagcataaagtgtaaagcctggggtgcctaatgagtgagctaactcacattaattgcgttgcgctcactgcccgctttccagtcgggaaacctgtcgtgccagctgcattaatgaatcggccaacgcgcggggagaggcggtttgcgtattgggcgccagggtggtttttcttttcaccagtgagacgggcaacagctgattgcccttcaccgcctggccctgagagagttgcagcaagcggtccacgctggtttgccccagcaggcgaaaatcctgtttgatggtggttaacggcgggatataacatgagctgtcttcggtatcgtcgtatcccactaccgagatatccgcaccaacgcgcagcccggactcggtaatggcgcgcattgcgcccagcgccatctgatcgttggcaaccagcatcgcagtgggaacgatgccctcattcagcatttgcatggtttgttgaaaaccggacatggcactccagtcgccttcccgttccgctatcggctgaatttgattgcgagtgagatatttatgccagccagccagacgcagacgcgccgagacagaacttaatgggcccgctaacagcgcgatttgctggtgacccaatgcgaccagatgctccacgcccagtcgcgtaccgtcttcatgggagaaaataatactgttgatgggagtctggtcagagacatcaagaaataacgccggaacattagcgcaggctgcttccacagcagtggcatcctggtcatccagcggatagttaatgagcagcccactgacgcgttgcgcgagaagattgtgcaccgccgctttacaggcttcgacgccgcttcgttctaccatcgacaccaccacgctggcacccagttgatcagcgcgagatttaatcgccgcgacaatttgcgacggcgcgtgcagggccagactggaggtggcaacgccaatcagcaacgactgtttgcccgccagttgttgtgccacgcggttgggaatgtaattcagctccgccatcgccgcttccactttttcccgcgttttcgcagaaacgtggctggcctggttcaccacgcgggaaacggtctgataagagacaccggcatactctgcgacatcgtatagcgttactggtttcacattcaccaccctgaattgactctcttccgggcgctatcatgccataccgcgaaaggttttgcgccattcgatggtgtcaacgtaaatgcacgccgcttcgccgtccggctaccagaatagcctgcgattcaaccccttcttcgatctgttttgctacccgttgtagcgccggaagatgcttttccgcggcctgttcaatggtcattgcgctcgccatatacaccagattcagacagccaatcacccgttgttcactgcgcagcggtacggcgatagaggcgatcttctcctcctgatcccagccgcggtagttctgtccgtaaccctctttgcgcgcgcgcgccagaatggcttccagctttaacggttctcgtgccagttgatagtcatcaccggggcgggcggctaacatttcgattaattccttgcgttcttgttccgggcaaaaggccagccaggtcaggcccgaggcggttttcagaagcggcaaacgtcgcccgaccattgcccggtgaaaggataagcggctgaaacggtgagtggtttcgcgtaccaccattgcatcaacatccagcgtggacacatctgtcggccataccacttcgcgcaacagatcgcccagcagtggggccgccagtgcagaaatccactgttcgtcacgaaatccttcgcttaattgccgcactttgatggtcagtcgaaaactatcatcggaggggctacggcggacatatccctcttcctgcagcgtctccagcagtcgccgcacagtggtgcgatgcaggccgctgagttccgccagcagcccgacgctggcaccgccatcaagtttatttaacatatttaataacattagaccgcgggttaagccgcgcacggttttgtattccgtctgctcagtgttctgcatattaattgacatttctatagttaaaacaacgtggtgcacctggtgcacattcgggcatgttttgattgtagccgaaaacacccttcctatactgagcgcacaataaaaaatcatttacatgtttttaacaaaataagttgcgctgtactgtgcgcgcaacgacattttgtccgagtcgtgaggtactgaaatggcaatacaacaccctgacatccagcctgctgttaaccatagcgttcaggtggcgatcgctggtgccggcccggttgggctgatgatggcgaactatctcggccagatgggcattgacgtgctggtggtggagaaactcgataagttgatcgactacccgcgtgcgattggtattgatgacgaggcgctgcgcaccatgcagtcggtcggcctggtcgatgatgttctgccgcacactacgccgtggcacgcgatgcgttttctcaccccgaaaggccgctgttttgctgatattcagccaatgaccgatgaatttggctggccgcgccgtaacgcctttattcagccgcaggtcgatgcggtgatgctggaaggggtgtcgcgttttccgaatgtgcgctgcttgttttcccgcgagctggaggccttcagtcagcaagatgacgaagtgaccttgcacctgaaaacggcagaagggcagcgggaaatagtcaaagcccagtggctggtagcctgtgacggtggagcaagttttgtccgtcgcactctgaatgtgccgtttgaaggtaaaactgcgccaaatcagtggattgtggtagatattgccaacgatccgttaagtacgccgcatatctatttgtgttgcgatccggtgcgcccgtatgtttctgccgcgctgcctcatgcggtacgtcgctttgaatttatggtgatgccgggagaaaccgaagagcagctgcgtgagccgcaaaatatgcgcaagctgttaagcaaagtgctgcctaatccggacaatgttgaattgattcgccagcgtgtctacacccacaacgcgcgactggcgcaacgtttccgtattgatcgcgtactgctggcgggcgatgccgcgcacatcatgccggtatggcaggggcagggctataacagtggtatgcgcgacgcctttaacctcgcatggaaactggcgttggttatccaggggaaagcccgcgatgcgctgctcgatacctatcaacaagaacgtcgcgatcacgccaaagcgatgattgacctgtccgtgacggcgggcaacgtgctggctccgccgaaacgctggcagggtacgttacgtgacggcgtttcctggctgttgaattatctgccgccagtaaaacgctacttcctcgaaatgcgcttcaagccgatgccgcaatattacggcggtgcgctggtgcgtgagggcgaagcgaagcactctccggtcggcaagatgtttattcagccgaaagtcacgctggaaaacggtgacgtgacgctgctcgataacgcgattggcgcgaacttcgcggtaattggctggggatgcaatccactgtgggggatgagcgacgagcaaatccagcagtggcgcgcgttgggcacacgcttcattcaggtggtgccggaagtgcaaattcataccgcacaggataaccacgacggcgtgctacgcgtgggcgatacgcaaggtcgtctgcgtagctggttcgcgcaacacaatgcttcgctggtggtgatgcgcccggatcgctttgttgccgccaccgccattccgcaaaccctgggcaagaccctgaataaactggcgtcggtgatgacgctgacccgccctgatgccgacgtttctgtcgaaaaggtagcctgatatgcacgcttatcttcactgtctttcccactcgccgctggtggggtatgtcgacccggcgcaagaggtgctcgatgaggtcaatggcgtgattgccagcgcccgcgagcgtattgcggctttctcccctgaactggtggtgctgtttgcgcctgatcactacaacggctttttctatgacgtgatgccaccgttctgtttaggcgttggagcgacggcaattggtgatttcggcagtgcggcaggagagctgcccgtgcctgtggagctggcggaggcctgtgcgcatgccgtcatgaagagcgggatcgatcttgccgtttcttactgtatgcaggtggaccacgggttcgcccagccactggagttcctgctcggcgggctgtataaggtgccagttctgcctgtgttcatcaacggtgtcgccacgccgctgcccggtttccagcgtacccgcatgttgggtgaagccattggacgtttcaccagcactctcaataaacgcgtgctgttcctgggttccggtgggctttcccatcagccgccggtgcccgaactggcgaaagccgatgcccatatgcgcgaccgtctgttggggagcgggaaagatttacccgccagtgagcgcgaattgcgtcagcaacgggtgattagcgccgctgagaagtttgttgaggatcagagaactctgcatccgctcaacccgatttgggataaccagttcatgactttgctggagcagggacgcatacaggaactggatgccgtcagtaacgaagagctttccgccattgccggaaagtcgacacatgaaatcaaaacctgggtcgccgcttttgccgctatttctacatttggcaactggcgtagcgaagggcgttattaccgcccaatcccggagtggattgccggatttggctcgttaagcgccagaacagagaactgaatatgcaggagaagatgatgagttatcagccacaaaccgaagccgccaccagccgttttctgaatgtagaagaagcgggtaaaacgctgcgcatccattttaatgactgcggacaaggcgacgaaaccgttgtcctgctgcacggttccggcccgggtgctactggctgggcgaacttcagccgcaatatcgatccgctggtagaggcgggctatcgggtgatcctgctggattgtccgggttggggcaaaagcgattcgatcgttaatagtggttcacgatcggatcttaatgcacgaatcctgaaaagcgtggtggatcaactggatatcgccaaaatccacctgctgggcaactcgatgggcggccatagttctgtggcgttcacccttaactggccggagcgcgtcggcaaactggtgctgatgggcggcggtacgggcggcatgagtttgtttacgccgatgccaaccgaaggtattaagcgactgaatcagctttatcgtcagccgactatcgaaaacctgaagctgatgatggatatcttcgttttcgataccagcgatttgaccgacgccctgtttgaagcgcgcctgaataatatgctgtcgcgccgcgatcacctggaaaacttcgttaagagcctggaagctaatccgaaacagttcccggattttggcccacgtctggcggaaatcaaagcgcaaaccctgattgtctgggggcgcaacgaccgctttgtgccgatggatgcgggtctgcgtctgctgtccggcattgccggttctgaactgcatatcttccgcgactgtggtcactgggcgcagtgggaacatgccgacgctttcaatcaattggtgctgaatttcctcgcacgcccttaaggaatggtcatgacgaagcatactcttgagcaactggcggcggatttacgccgcgccgcagagcagggcgaagcgattgcgccgctgcgcgatctgattggtatcgataacgctgaagcggcctacgccattcagcacataaatgtgcaatatgacgttgcgcaggggcgtcgcgtggtagggcgtaaagtgggcctgacgcatccgaaagtgcagcaacaactgggcgttgatcaaccggatttcgggacattatttgccgacatgtgttatggcgataacgaaatcattcctttttcccgtgttctgcaagcccgcattgaagcggagatcgcactggtgttgaaccgcgatttgcccgcaaccgatatcaccttcgacgaattgtataacgccattgaatgggtacttccggcgctggaggtggtgggtagccgcattcgcgactggtcgattcagtttgtcgataccgtggcagataacgcttcctgcggggtgtatgtcatcggcggtccggcgcaacgtccggcggggttagacctgaaaaactgcgccatgaagatgacgcgtaataacgaagaggtttccagcgggcgcggcagcgaatgcctgggacatccgcttaatgccgccgtctggctggcacgcaaaatggccagcctgggtgaaccgctgcgcgccggagatatcattcttaccggggcattaggtccgatggtggcagtgaatgcgggcgatcgttttgaagcccatattgaaggcataggttcagttgctgcgacattttcaagcgcagccccaaaaggaagtctgtcatgagtaagcgtaaagtcgccattatcggttctggcaacattggcaccgatctgatgattaaaattttgcgtcacggtcagcatctggagatggcggtgatggtcggcattgatcctcagtccgacggtctggcgcgtgccagacgtatgggcgtcgccaccacccatgaaggggtgatcgggctgatgaacatgcctgaatttgctgatatcgacattgtatttgatgcgaccagcgcgggcgcgcatgtgaaaaacgatgccgctttacgcgaagcgaaaccggatattcgcttaattgacctgacgcctgctgccatcggcccttactgcgtgccggtggttaacctcgaggcgaacgtcgatcaactgaacgtcaacatggtcacctgcggcggccaggccaccattccaatggtggcggcagtttcacgcgtggcgcgtgttcattacgccgaaattatcgcttctatcgccagtaaatctgccggacctggcacgcgtgccaatatcgatgaatttacggaaaccacttcccgagccattgaagtggtgggcggcgcggcaaaagggaaggcgattattgtgcttaacccagcagagccaccgttgatgatgcgtgacacggtgtatgtattgagcgacgaagcttcacaagatgatatcgaagcctcaatcaatgaaatggctgaggcggtgcaggcttacgtaccgggttatcgcctgaaacagcgcgtgcagtttgaagttatcccgcaggataaaccggtcaatttaccgggcgtggggcaattctccggactgaaaacagcggtctggctggaagtcgaaggcgcagcgcattatctgcctgcctatgcgggcaacctcgacattatgacttccagtgcgctggcgacagcggaaaaaatggcccagtcactggcgcgcaaggcaggagaagcggcatgaacggtaaaaaactttatatctcggacgtcacgttgcgtgacggtatgcacgccattcgtcatcagtattcgctggaaaacgttcgccagattgccaaagcactggacgatgcccgcgtggattcgattgaagtggcccatggcgacggtttgcagggttccagctttaactatggtttcggcgcacatagcgaccttgaatggattgaagcagcggcggatgtggtgaagcacgccaaaatcgcgacgttgttgctgccaggaatcggcactattcacgatctgaaaaatgcctggcaggctggcgcgcgggtggttcgtgtggcaacgcactgtaccgaagctgatgtttccgcccagcatattcagtatgcccgcgagctcggaatggacaccgttggttttctgatgatgagccatatgaccacgccggagaatctcgcaaagcaggcaaagctgatggaaggctacggtgcgacctgtatttatgtggtggattctggcggtgcgatgaacatgagcgatatccgtgaccgtttccgcgccctgaaagcagagctgaaaccagaaacgcaaactggcatgcacgctcaccataacctgagtcttggcgtggcgaactctatcgcggcggtggaagagggctgcgaccgaatcgacgccagcctcgcgggaatgggcgcgggcgcaggtaacgcaccgctggaagtgtttattgccgccgcggataaactgggctggcagcatgggaccgatctctatgcgttaatggatgccgccgacgacctggtgcgtccgttgcaggatcgaccggtacgagtcgatcgcgaaacgctggcgctgggatacgctggtgtttactcgagcttcctgcgtcactgtgaaacggcggcggcgcgttatggcttaagtgcggtggatattctcgttgagctgggcaaacgccggatggttggcggccaggaggatatgatcgttgacgtggcgctggatctgcgcaacaacaaataatgatgactgccgagaacgtgcattttgtatgcccatcccagcacgactgccggatgcggcgtgaacgccttatccggcctacatttcgcccgtaggcagtcattaaatagttctgattacgcggctggcaatgtatcagtcgcgattcacctgcactcgcaatgaggttcatcttatgtcgactcgtaccccttcatcatcttcatcccgcctgatgctgaccatcgggctttgttttttggtcgctctgatggaagggctggatcttcaggcggctggcattgcggcgggtggcatcgcccaggctttcgcactcgataaaatgcaaatgggctggatatttagcgccggaatactcggtttgctacccggcgcgttggttggcgggatgctggcagaccgttatggtcgtaagcgtattttgattggctcagttgcgctgtttggtttgttctcactggcaacggcgattgcctgggatttcccctcactggtctttgcgcggctgatgaccggtgtcgggctgggggcggcgttgccgaatcttatcgccctgacgtctgaagccgcgggtccacgttttcgtgggacggcagtgagcctgatgtattgcggtgttcccattggcgcggcgctggcggcgacactgggtttcgcgggggcaaacttagcatggcaaacggtgttttgggtaggtggtgtggtgccgttgattctggtgccgctattaatgcgctggctgccggagtcagcggttttcgctggcgaaaaacaggctgcgccaccactgcgtgccttatttgcgccagaaacggcaaccgcgacgctgctgctgtggttgtgttatttcttcactctgctggtggtttatatgttgatcaactggctaccgctacttttggtggagcaaggattccagccatcgcaggcggcaggggtgatgtttgccctgcaaatgggtgcggcaagcgggacgttaatgttgggcgcattgatggataagctgcgtccagtgaccatgtcgctactgatttatagcggcatgttagcttcgctgctggcacttggaacggtgtcgtcatttaacggtatgttgctggcgggatttgtcgcggggttgtttgcgacaggtgggcaaagcgttttgtatgccctggcaccattgttttacagttcgcagatccgcgcaacaggtgtgggaacagccgtggcggtagggcgtctgggggctatgagcggtccgttactggccgggaaaatgctggcattaggcactggcacggtcggcgtaatggccgcttctgcaccgggtattcttgttgctgggttggcggtgtttattttgatgagtcggagatcaagaatgcagccgtgtgccgatgcctgacgcgccttattaagcaggggcgaaagggagttgcccccaatacacccacggcgtttacaggtatactcgctaaaaattattcagcgggtttggaaacaaagatggcaaaacttaccttacaagagcagttgctcaaagcaggattagtcaccagcaaaaaagcggcgaaggtggagagaacggcgaaaaaatcgcgcgttcaggcgcgtgaagctcgggcggcggtagaagaaaataaaaaggcacagcttgagcgtgataaacagcttagcgagcaacaaaaacaagctgcgttggcgaaagaatataaagctcaggtgaagcagctcattgaaatgaaccgaatcaccattgccaatggcgatattggttttaacttcactgacggcaatctgattaagaagatttttgtcgataagctcacacaggcgcagttgattaatggtcgtctggcgattgcccgcttgttggtcgataacaatagcgaaggtgaatacaccattattcccgccagtgttgccgataaaattgctcagcgtgatgccagcagtattgtgttgcacagcgcgctcagtgccgaagagcaggatgaagacgatccgtatgccgacttcaaagtgcctgatgatttgatgtggtaaacatagataagtcgtgcgcagatgcctgatgcgacgctatgcgcgtcttatcaggccttgtattatccctccagtgcagagaaaatcggccagttttctctgcctgcagtccgcatgccgtatcgggccttgggttctaacctgttgcgtagatttatgcagcggactgcctttctcccaaagtgataaaccggacagtatcatggaccggttttcccggtaatccgtatttgcaaggttggtttcactatggaacatgaacttcattatatcggtatcgacaccgctaaagagaaactggatgtcgatgtgttgcgtcctgatggtcgtcatcgcaccaaaaaattcgctaacaccactaaagggcacgatgagctggtgagctggctgaaaggtcacaagattgaccatgcgcatatctgcatcgaagcgaccggcacctatatggaacctgtcgctgagtgcctttacgatgctggctacatagtgtcagtcattaatcctgcgctgggtaaagctttcgctcagagtgaaggactgcgtaacaagactgataccgtggatgcgcgcatgctggcagagttctgtcgtcagaagcgccctgcagcctgggaagcgcctcacccgcttgaacgcgcgttgcgtgccctggtagtccgccaccaggcgctgacagatatgcacacgcaggaactgaatcgcactgaaacggcgcgggaagtccagagaccgagcattgatgctcaccttctgtggcttgaagcagagctgaagcgtcttgagaagcagataaaagacctgacagacgatgatccggatatgaaacaccgcaggaaactgctggaaagcatcccgggtatcggagagaaaacatctgcggtattgctggcttatatcggtctgaaggaccgcttcgcccatgccagacagttcgccgcttttgcgggtctgacaccacggcgttatgaatcaggtagcagtgtgagaggggcgagccggatgagtaaggccggacatgtgtcgcttcgcagggcgttgtatatgcccgcaatggtagccaccagtaagactgagtggggacgggcgttccgcgaccgtctggcggctaatggcaagaaaggaaaggtgattctcggcgcgatgatgcgcaagctggcacaggtggcgtatggagtgctgaagtcaggcgtgccgttcgatgcgtcacggcataatccggtagcggcgtaaaaatcgcggaagggatgaaaaaaacagcgcctgacggcgctggtgtctggcatgcctgcaatccgggaaaccggaccaggaaaaacttgcaggccataacagtatctacggtttatgggcgaagtgtaggccggataaggcgttcacgccgcatccggcagtcgtgcactattatcaacgcatattcagtttattggcgtggtaggcaat

SEQ ID NO: 480 - DNA, 294327 bp, Escherichia coli
ccatawcagtatctacggtttaygggcgaagtgtaggccggataaggcgttcacgccgcatccggcagtcgtgcactattatcaacgcatattcagtttattggcgtggtaggcaatatgctcgccaataaaactggagacaaaataatagctgtggtcgtaaccctcgtgataacggattaacgtcttgatattcatctcctggcagatcttttcaagatttggagtccgcagctgttccgcgtaaaaatcatcactcaacccctgatcaaccatgatttccgcaacgcgttgaccttgtgaaataagactcaccggatcgtaatccaaccaggcatctttattttcaccaagatatgcggcaaaggcttgctgtccccacggtacttgcgatggggagacaatgggcgaaaacgccgagacgctgacatattcatctgggttacgtaacgccagcaccagcgcgcccagcccgcccatagaatgaccagagatagactttctggtcgttgccggaaaatgttgcatcactaaatccggcagctcgttgcggatatagtcatacattttgtaatgttcattccacggcgcttgcgttgcgttcaggtaaaacccggcaccttgcccgagatcgtaacggtcggcatctgcgacatgactgcctcgcggactggtgtccggcgcaacaacaataatgttgtgttcagccgcgtaacgctgcatccccgatttagtaatgaaattctgctcgttgcaggtcaggcccgaaagccagtacagcaccggcaatttttcattcgcggcttttggtgggagatagacgccgacattcatttcacatttcagtgattgggaataatgccgatacacattttgccagccgccaaagctggcatgtttttcaatgagttccatcagtcattatctcacggttaatcccccggacggctgcccagggagagtattaagaaccccgtctgaagtggacggggtatacctgcgggaaatcagtaacgaattacggttcgaatggatttgccttcatgcatcaggtcgaaggcgtcattaatttcatcaaggctcatggtatgcgtgacaaacggttccagatcgatatcacctttcatcgcatcttcaaccatacccggtaactgggaacgacctttcacgccgccaaacgcggaacctttccatacgcgaccagtgaccaactggaatggacgggtggagatttcctgaccagaacctgccaccccgatgatcaccgactgaccccagccgcggtgcgcactttccagcgccgcacgcatcacgttgacgttaccgatgcattcaaaggtatggtcgataccccatttgttgatatccagcaggacatctttaatcggtttgtcgtagtcattcgggttaatgcagtcggtagcaccgaagcgacgcgccagatcgaatttcttcgggttggtatcgatagcgataatccgtcccgctttcgcctgacgcgcgccctgaaccactgccagaccaatcgcgccaagaccaaacacggcaacagaatcacctggctggactttagctgtgttgtgcaccgcgccaataccggtggtcacgccacagcccagcagacagacgtgttcatggtttgcttctggattaattttggccagagacacttccgcgaccacggtgtattcactgaatgtagagcaccccatgtagtgataaagcggctgcccgttgtaagaaaaacgggtggtgccgtctggcatcaagcctttaccctgggtttcgcgaaccgcaacacagaggttagttttgccagaacgacagaactcacactcgccgcactccgcggtgtaaagcgggatcacatggtcgccaggtttgacgctggttacgccttcaccgacttcaaccacaacgccggccccttcgtgaccgagaaccaccgggaatacaccttccgggtcatccccggagagggtaaatgcgtcggtatggcaaacgccggtatgggtgactttaatcagcacttcaccttttttcggtggtgcaacgtcaatttcaacgatttccagcggtttaccgggagcaaatgcaacggcagcacgtgatttcatctctcgctcttcctcaatatggtaatagattcagctatttaagataggctcgaaccagttcaatagtgtcgtcaacggattggctgacttcgcggctgtagcagtcatttcggtcaaacgtttcccggatatggctttcaagcacttctgccatcagcccgttagccgcgccccgaacggcagcgatctgttggagtatggcacggcattcggcatcaccctccagcgaccgttccagagcatcaatctgccctcgaatacgacgaactcgagtaaggacctttttcttctcttccggagtactgggcatttcgcacctcatcatctgcacgcaatatactataggggggtatgctatatgtcaatgcatacccccctatagtatataacactggagaataaaatttatccggtgaatgtggtcggaaaacaaagaggaaaggggggggctaatcggcagggaaggccgccccggatagcgggcggcagaaggaatcagaatttccaggtcagatgggctgcaagttgcagaccgttataatcatcggttggggtgtcgtaccacactttacctgccgtcagcccgagattaagttgctcagtcagcggttgaatacgttgcagactgacgctcttcatgctgccgtagcgtgtttctggcgtccagtcataggtgtaagcgcctgttccgcggcttagccatagttgcgtataaccagtgccgcgcgggtcattcagacgcacggaaatcatattgctataactaccacctgcatcgctggagtcataatgggtatagcggtagctggtgatcaccgggccagtatagagtgatacgccgccttgccaggcatcgacttcgacatcatcgtaatatttagtgtagcgataaccggtcgtgaaaagcgtttttggcaacagggccaggttaatatcctgacgaaaattctggcgggcaaagaccggcgtattatccgcaaaggcaatacccgttcgggttgtcagccagttattccatttataccagaccgcaccctgaccgcgagtggcattgaaatgttcagtttcataatcacgacgcccctgggaaagattaaaaagcagcgttgcgttttcaactttcgccaccagttcagcatacgctaaattacggttgccatgatcgccagaataatcggtaaaatcgtagcccgcggtaatggaagttaacccggcataagcgggcaatgcgctaaaaatggccgccgctaataacgtccgttttatcattttaatctcctgtacggataagttcttgtcggagtgaataagttccggcaggtaaattacgttctacaatcacgcgcgggccaagttgcgtgttcggggaaataattcgcccaggcaaaattataacttgtacgccaaggcgtgaacgctgcccgatataacaacctaatttatcgcatccggtagcgataattccctctggagttcgaacagacacaggctgttcatccagacgatgattactggtacgtacttgtgcgcccaaatatgcctggtttgcaactaccgagtcggcaataaaacattgcggaccaatcgttgcttccgcttcaataaccgcatttttaatttcggtggcaaaaccaatttttacaccattgctgattattgtgccaggacgaataaacgcataattacctatcaggcagtttgcgccaatcactaccggaccctgaataacggcaccatgacaaatacgggtattcgcgccgataacaacttcacctgcagtttcatcaataattacctggtctgcaatctgaatatttttctctttaacattaagcttcagatagtttttcagttcctgtgacagaaggttgggaataagcggttgacgcttccaccagtgcggaatagcgggtgggtttgtcgcgctgaggttcgcgtccagtaaaaaaggcaataagtccataaataatccagatggcataagctaataatacatacacaacggaaagcggcgctaaaggcaccaacaaccagcaacgatgaaaccaggcgctaaaagcaccaataacacaaactacgccgatccagataagcggaaacattgccaacaccacaccatgcggcccggtggtgatgaattcattaaaccaggtagtgagataaatcccaacgccataaatcacaaccaacagcataggaaatatactgaagataccgaagcggctaaataaaagtcttttatgcaggcgcatacagaccgcgtatcccacaatccaacgccgccagcgacgccactcctcacgcggactgttgcattcctgtgggtatacgatgcagcgattcgcctgccgaatacggtagccgtttgccactaatgtccaggtgagatcaaggtcttcgactttagtacgatctgagaaaccgaacttacgcaatacatcagtacggaacatcccgcaggcaccgctgataataaacggtgcgccgcccaggagctgctgtagcgtgcgcttcataacaatcatcggcaactttacggtcgcgcggatgtgcggtaacagccccgcgcctttcaacgcagtagagggaatgccgcctacggcatcagcaccgcgctcaatttctgccagcatatagcccattccgtcttgatcgggcggaacataggtgtcgccatcacttaaaaaaacctggtcgcaggtggcataattgaggccattcatcagcgcaccacctttaccggtatttttttgcgtgacggcaacaaagcggtcgccccatttgcgtttgacttccgccatgaccgcttcggtattgtccgtggagccgtcgttaacgcaaattacccggcaaaaataagggttacgcagtagattatccagtgactgcgccagacacgggccttcgttatacgcaggtataatggcgtcaatacagcctttcttttgactgggtttacgtcttagcgtacttaaaaaccatagcaacattgctatggacatacagataaatatccaggttttcatgcaatttgctcaaagaatcattttatgaattacaaagccttcacccagatcgctattgacctgttgcccgcgaaattgtgcaactgcacgcaggcgatcatgacgcatataatcacgtcgttcctggcttttatgtttttttaatgcagcaagtttgactgtgaaatattcttctttaacggattcaaaaacctgaggcataaatgaaagccaggtacttggggtttcgtagccgagaatttgtggaatagtgcggcaggcaaccattgaagcttgataaacagcgagatgatcctgatggcggtcggcatcatgcatggtatatacccgcatgatttcaacatcagaaggaatttgatttttaatgatgtcttccagagcggaaatcatatcattgagctgtaaatgagcgcgggtgtcagcaaaattaagatgaatagtttggtggcaccctaatatctttagggcgttgcgcgattcttcatggcgatcgattattccatctgtaccagagttgccggtagtcatcaccacggctgcgatataaattcctttttgcgcaagacgagcaagcgatgcgccacagcctaattctatatcgtcaggatgtgcgccaatagcaaggataccctttcttttatttgccgaagaaaggagggctgaatctaaaaccttatccacttaatgacactccattttatttattatactacaagcacaacgatgcactcagagacgtaatctctggcgcagccagatgttaatttataaatgttaaatgttgctaataactgaaaagcaagggctttcagacccggaggttcgactgggtaatgtttttatgcaattcatatgttaagtgtttgtatgtttggtatgtatagttattttgttttatacattgtatttagatgtgatttagtttgtcaattaattgcatttaaaaaatatgttctgtgaacaagtattgtttatatacattatgtgaatgtaatatgcgagtgattgagaatgatacagtgatatatacaatgcgaatataatagttttattatatgtattgatattgatagaaataatgaagtaataaatctcgtaatgtggttgtttatgcatcactaaaatgaagtgtagtaattttcccaattgttagaacggagtaattgcatatttaatctttcctttgccgtttttttgctaagaataaaatcatctgtgcgataacgactaattcttttaatgaatgtttttattcctgaatactgctcacataacaagacaggggagcagacaatcatggcaatttcatcgcgtaacacacttcttgccgcactggcattcatcgcttttcaggcacaggcggtgaacgtcaccgtggcgtatcaaacctcagccgaaccggcgaaagtggctcaggccgacaacacctttgctaaagaaagcggagcaaccgtggactggcgtaagtttgacagcggagccagcatcgtgcgggcgctggcttctggcgacgtgcaaatcggcaacctcggttccagcccattagcggttgcagccagccaacaggtgccgattgaagtcttcttgctggcgtcaaaactgggtaactccgaagcgctggtggtaaagaaaactatcagcaaacccgaagatttgattggcaaacgcattgccgtaccgtttatctccaccacccactacagcctgctggcggcgctgaaacactgggggattaaacccgggcaagtggagattgtgaacctgcagccgcccgcgattatcgccgcatggcagcggggtgatattgatggtgcttatgtctgggcaccggcggttaacgccctggaaaaagacggcaaggtgttgaccgattctgaacaggtcgggcagtggggtgcgccaacgctggacgtctgggtggtgcgcaaagattttgccgagaaacatcctgaggtcgtgaaagcgttcgctaaaagcgccatcgatgctcagcaaccgtacattgctaacccagacgcgtggctgaaacagccggaaaacatcagcaaactggcgcgtttaagcggcgtgccggaaggtgacgttccggggctggtgaaggggaatacctatctgacgccgcagcaacaaacggtagaactgaccggaccggtgaacaaagcgatcatcgacaccgcgcagtttttgaaagagcagggcaaggtcccggctgtagcgaatgattacagccagtacgttacctcgcgcttcgtgcaataaaaggaggcgcagatgctgcaaatctctcatctttacgccgattatggcggcaaaccggcactggaagatatcaacctgacgctggaaagcggcgagctactggtggtgctggggccgtccggctgcggtaaaaccacgttgctgaatctgattgccggttttgtgccttatcagcatggcagcattcaactggcgggtaagcgtattgagggaccgggagcagagcgcggggtggtttttcagaatgaagggctactaccgtggcgcaatgtacaggacaacgtggcgttcggcctgcaattggcaggtatagagaaaatgcagcgactggaaatcgcgcaccagatgctgaaaaaagtggggctggaaggcgcagaaaaacgctttatctggcagctttccggtggtcaacgtcagcgggtggggattgcccgcgcgctggcggcgaatccccagctgttattactcgacgaaccgtttggtgcgctggacgccttcacccgcgaccagatgcaaactctgctgctgaaactctggcaggagacgggcaagcaggtgctgttgattacccacgatatagaagaagcggtgtttatggcgactgaactggttctgctttcatccggccctggccgtgtgctggagcggctgccgctcaactttgctcgccgctttgttgcgggagagtcgagccgcagcatcaagtccgatccacaattcatcgccatgcgcgaatatgttttaagccgcgtatttgagcaacgggaggcgttctcatgagtgtgctcattaatgaaaaactgcattcgcggcggctgaaatggcgctggccgctctcgcgtcaggtgaccttaagcattggcacgttagcggttttactcactgtatggtggacggtggcgtcgctgcaactgattagcccgctgtttttgccgccgccgcaacaagtactggcaaaactgctcaccattgccggaccgcagggatttatggacgccacgctgtggcagcatctggcagccagcctgacgcgcattgtgctggcgctactcgcggcggtggtgatcggtattccggtcgggatcgccatggggctaagcccgacggtgcgcggcattctggatccggtaatcgaactttatcgtccggtgccgccgctggcttatttgccgctgatggtgatctggtttggtattggtgaaacctcgaagatcttactgatctatttagcgatttttgcaccggtggcgatgtcggcgctggcgggggtgaaaagcgcgcagcaggttcgcattcgtgccgcccagtcgctgggtgccagccgtgcgcaggtgctgtggtttgtcattttgcccggcgcgctgccggaaatcctcaccggattacgcattggtctgggtgtgggctggtctacgctggtagcggcggagctgattgccgcgacgcgcggtttaggatttatggttcagtcagcgggtgaatttctcgcgactgacgtggtgctggcggggatcgcggtgattgcgattatcgcctttcttttagaactgggtttgcgcgcgttacagcgccgtctgacgccctggcatggagaagtacaatgagtgaacgtctgagcattaccccgctggggccgtatatcggcgcacaaatttcgggtgccgacctgacgcgcccgttaagcgataatcagtttgaacagctttaccatgcggtgctgcgccatcaggtggtgtttctgcgcgatcaaactattacgccgcagcagcaacgcgcgctggcccagcgttttggcgaactgcatattcaccctgtttaccctcatgccgaaggggttgacgagatcatcgtgctggatacccataacgataatccgccggataacgacaactggcataccgatgtgacatttattgaaacgccacccgcaggggcgattctggcagctaaagagttaccttcgaccggcggtgatacgctctggaccagcggtattgcggcctatgaggcgctctctgttcccttccgccagctgctgaacgggctgcgtgcggagcatgatttccgtaaatcgttcccggaatacaaataccgcaaaaccgaggaggaacatcaacgctggcgcgaggcggtcgcgaaaaatcctccgttgctacatccggtggtgcgaacgcatcctgtgagcggtaaacaggcgctgtttgtgaatgaaggctttactacgcgaattgtcgatgtcagcgagaaagagagcgaagccttgttaggctttttattcgcccatatcactaaaccggagtttcaggtgcgttggcgctggcaaccgaatgatattgcgatttgggataaccgcgtgactcagcactatgccaatgccgattatctgccacagcggcggattatgcatcgggcgacgatccttggggataaaccgttttatcgggcggggtgatacgagtgcggacggttccctcgcccccttggggagagggttagggtgagggggcgttcaccgtactttcaacaggttaactccccctttctgagaggaaaaaaattaacgcagaatcttcttctcagccaaatccagcgcaaagtagctgaaaatcagatccgcacccgcacgcttaattgaacctaagctttcgagcacgactttctcttcatctatagcacccgccagcgcggcgaacttaatcatcgcgtactcaccgctcacctgatacgcgccaatcggcaattcagtacgttcacgcagctcacgcacgatgtcgaggtacgctccagcaggtttaaccatcaggcagtctgcgccctgggcttcatccagcagtgactcacgaatcgcctcgcgacggttcattgggttcatctgatagcttttgcggtcgccttttaatgcgcttccggcagcttcacggaacgggccataaaaggaagaggcgaacttggtcgaatacgacataatcgccgtatctttaaagcctgcagcgtccagcgcctgacgaatcgcctgtacctggccgtccatcgcggcggaaggggcgatgaagtctgcgcctgcagcagctgcaaccacggcttgcttgcctaaattttccagagtcgcgtcgttgtcgacgccatgctcgcacagcacaccgcagtgaccgtgagaagtgtattcacagaaacaagtgtctgacatgacgatcatttctggcacagtctgcttgcagatgcgcgacatacgcgccaccagtccatcttcccgccaggcgtcgctgccggtttcatcggtatggtgagagatgccaaaagtcattacggaacggataccggcgttggcgatgcgttcaatttcgcgtgccagatgtttctctggaatgcgcatcacgcctggcatggcttcaacggctttgtagtcgtcaatttcttcttcaacaaagatcggcaacaccaggtcgttaaggctaagtgttgtctcttcaaacatagcgcgcagcgcaggagatttgcgcaggcgacgagggcgttggattaagtctgtcatggtctgcctgatgtttgtggaattaaggtgcacagtatacctgaagcggggcaggagtgttttacgaaagttgtcgtgatgttgacaagaagagaatgaaagagagaccaggacatctttgtaatagaaatagcaataatttcatattcactgaaaatatttttaatctttatttatagctcttggttattattttttggcgtttggttgtgctgctataaattgaataattcaaactttgttgtatattgataagatatttatctggtttgtgtttttgatatttataacgcgtatgtatcaaaaataacattatctgcaacatgttgaaatatcgcccttttatcaatttgatgcgtgtttttctccataggttatatatgtccacattcggacttaggggaaagaataattgaaccattcgtctgtaacgcagcataatcattagcgcgaaacataatatgttttctatgcattgataattgatggatcaacttattacgtccctgaggagggatgacaaatgcactcctggaaaaagaaacttgtagtatcacaattagcattggcttgcactctggctatcacctctcaggctaatgcaactacttataatacattcgggtatcacgatgacgcagtcactctattcaattggggcgacaatactaaaactgatcacgactatttgacgtatggtggctatgtatacgaccatgcggctgatggttattttgatactgtatttagtggcgataccgttaatggtgtaatttctacttattatctgaatcacgactatggaacagataccgctaatactctgaatattacgaactcaaatattcacggtatgattacttccgatcagatcggatacggtgattacgtctggaccaacggtagcgattatactggtcatgattgggtagatggcgatattttcactctgaacatcgcgaactcaacaattgacgatgattttgatgcattctacttcaatgatacttatctggatgcagacggtaaaacgtctaaaacagattatgatcgtctggtaacagctgctcttggcaccgctgtaactctggatgttgaaagtaacatcaatatcagcaacaactcccatgttgcaggtattactctggttcaaaacgatttaggtaatgcgacttacaatactgaaggtcatcagtgggacaacaatatcgttgttaataattccactgtaacttcaggttcgctctcagaagacgaacaatcagatcgtggtcattttggcaactctgttgagccaagcgactatggtaatggtgcatcaggtgctgatgatgttgcattagccttcatagatgatgacacttctgattatcgtatggtcaacaacgttacattcaacaattctcagttgcttggcgacgttgtatttgacagtacctggaacgctaactttgacgcgacgggtcacctgattgacaactctaccactgcttacactcatggcggttgggctactgacgatcagaacgtcgatcacctgaacctgactctgaacaacaccaaatgggttggttcagcgaatattgattatgacgttgttgttgctgacgaagccttctacgacgttgcgccaaacagcctgaacccgtacgcttcttactctgaagatggctggaatcgtgttgataacgctaacgcattccagagtggcgtattcgatgttgttctgaacaatggttctgattgggaaaccacgaaagattctctgatcgataccctggctatcaacagcggttctcaggttaacgtgagtgcagattcttccctgacttccgacaccatcactctgaacggtagttcttcaatggaagttaacggtgaagttaacactgatcacctgatcattgataccttctctactgttaacttcggtgaagatactgcttcagcttggacatctgcaccgctgtacgccaacaccattaccgttactaacggtggtgtgctggatgtaaacaccaacatgaatgacatctccagcgtatttgcaactgatactctggaactgaccagtggcaacgttaaagataacaacggtaatgtttacgcaggtgtgtttgacattcatagtaatgactacatcctgaatgcagacctcgtcaacgatcgtaccaacgacaccagcaaatctaactatggttatggtgttattgcgatgaactctgatggtcacttgaccgttaatggtaacaacgacattaataatggcgacgaagttgacaacagctctgttgacaacgttgtagctgcaaccggtaactacaaagttcgtatcgacaactccactggtgctggcgcgattgctgattacgcaggtaagcagctcatctatatcgatgataccaaaaccaacgcgaccttctctgctgctaacaaagctgacctgggtgcatacacctatcaggctgaacagcgcggtaacaccgttgttctgcaacagatggagctgaccgactacgctaacatggcgctgagcatcccttctgcgaacaccaatatctggaacctggaacaagacaccgttggtactcgtctgaccaactctcgtcatggcctggctgataacggcggcgcatgggtaagctactttggtggtaacttcaacggcgacaacggcaccatcaactatgatcaggatgttaacggcatcatggtcggtgttgataccaaaattgacggtaacaacgctaagtggatcgtcggtgcggctgcaggcttcgctaaaggtgacatgaatgaccgttctggtcaggtagatcaagacagccagactgcctacatctactcttctgctcacttcgcgaacaacgtctttgttgatggtagcttgagctactctcacttcaacaacgacctgtctgcaaccatgagcaacggtacttacgttgacggtagcaccaactccgacgcttggggcttcggcttgaaagccggttacgacttcaaactgggtgatgctggttatgtgactccttacggcagcatttctggtctgttccagtctggtgatgactaccagctgagcaacgacatgaaagttgacggtcagtcttacgacagcatgcgttatgaactgggtgtagatgcaggttataccttcacctacagcgaagaccaggctctgactccgtacttcaaactggcttacgtctacgacgactctaacaacgataacgatgtgaacggtgattccatcgataacggtactgaagggtctgcggtacgtgttggtctgggtactcagttcagcttcaccaagaacttcagcgcctataccgatgctaactacctcggtggtggtgacgtagatcaagattggtccgcgaacgtgggtgttaaatatacctggtaatattcttcactccgaagaaattctggtaatttaatctaaataatgcccgtcaaggatttgacgggcattactgcaaaggacgcgcaaatgttatctgtagttaaacctcttcaggaatttggtaagctcgataaatgtttgtccagatacggtacgcgcttcgagtttaataatgaaaagcaagttatattttccagtgatgtcaataacgaagatactttcgttattttagagggcgttatctctctgcgtagagaagaaaacgtacttatcggtattacccaggctccttatattatggggctggctgatggtttaatgaaaaacgatataccatacaaattaatatcagaaggaaattgtacgggatatcatctaccagccaaacaaaccattacgcttattgaacaaaatcaactctggcgagacgctttttactggttagcctggcaaaatagaattctggaattacgcgacgtgcagctcattgggcataattcctacgaacaaatccgcgcaacattattatcaatgattgactggaatgaagaattgcgatcacgtattggtgtgatgaattatatccatcaacgtacacgcatatcgcgttctgtcgtcgcagaagttctcgctgctttgcgtaaaggcggctatatcgaaatgaataaaggcaaactggtcgctatcaaccgtttgccttcagagtattaatcaggatgcggggataaccaacggtttattcccgcttagctcggtcaccagatcattgatgccatcgctcatatttttaaagcgcgtcaacggcgaacgagtgaccaccacaaacgcgccaatattcttctgcgggatcatcgccatataggtaatgaaaccgccaccaccgcctgtcttctgaataatccccggacgaccctctttcggggccatatatacccagcctaaaccaagcgcatccgctttgccggggacatccatgccaatcactttcgtaaactgcgcgcgcagataaatcaacgtctgcatgcgatctgcttggttactgcgctgataaaaatcagatgacaaatactgctgcatccagcgcatcatatcgccaggcgtggaatagacgccgccgctgccaattgccgccagcgtgttattgcacggactggcaccgcgctcagcaaccattaaacggcggcactgatccggtgagggggtgtaggtggtgtctttcatccccaatggacgggtaatctgctcttcaaacaactgggtataaggcttgccggacgcattcgccagtgcatctgccagcaggtcgaacgcaaggttagagtacgccgcctgactgcctggcgcggcttttagcttcgccgtagaaaggtatttccagcgttgttcgcgcgttggccagacaaacaccggacgatgtgccgcgccaccgggctgttcacggggcagggcgctggtatgggttgccagattcactagggtaatgggcgtcccattgtaggtcggcacgcgtgcgcctggcggagcatatttacttagcggatcgtttaactttacggtcccctggtcgagcaatttcaccagcatttcactggtcattagtttggtgagggaagcaatacgcacgaccgaatccagctgcgggcgaacgttattaccaggtcgcgtttcgccataactacgaaagacgcgctggttaccgtcgataacaaccagcgccatccccgtggcaccgctgccgtaaaaaatatgatcggcataacgatcgacaatatcagaggcaaactccggttcagtgatcggctgcgccgcatggacggaggtcaatgacgccgcacacagcacggcagaaaaaagcagactacgtttcaacggtggtgtccatagattgaatgaaggtaactgagcgtatttatactactcattgatggattgcaaagggcgaattagtgcaataatagtgttaaaaacgtaacggcgcgtaaacacgatctttttcctgctcaccaatgcctgcatttgtgatcctgcgcgtgttaatccgcttatgtaaacaatctttggtttgtgaaatccgtcgaaacaattcttatggtcaggctggcgaactaagcgccttgctatgggtcacaatgggcggtttcatttggctgacgctttgtagcggtcatgcggttaaaacacagcagttgttaaaacgataagaagttagcaggagtgcatatgtttaagtcttttttcccaaagccgggagcgttttttctctcggcctttgtttgggcattgattgccgttatcttctggcaagccggtgggggtgactgggtggcgcgtatcaccggcgcttccgggcagatcccgattagcgccgcgcgtttctggtcgttggatttcctgattttttacgcttactacattgtttgcgtaggactttttgcatttttctggtttatctacagcccgcaccgttggcaatactggtcaatactcggtactgcactgatcatcttcgtcacctggtttttggtggaagtcggggtcgccgtcaacgcctggtatgcaccgttctatgatctgattcaaaccgcgctaagttcgccgcataaagtcactatcgaacaattttaccgcgaagtgggcgtctttctggggattgcgctgatcgctgtggtgatcagtgtgctgaacaacttctttgtcagtcactacgtgttccgctggcgtacggcgatgaacgaatattacatggcgaactggcaacaactgcgtcatatcgaaggggccgcacagcgtgtgcaggaagacaccatgcgttttgcttcaacgctggagaatatgggcgtcagttttatcaacgccatcatgacgttgatcgccttcctgccggtgctggtaacgctctccacgcatgtgccggagctgccgattatcgggcacattccgtatggtctggtgattgccgctatcgtctggtcgctgatggggaccggattgctggcagtggtagggatcaaactgccggggctggagtttaaaaaccagcgagtagaggccgcctaccgtaaagagctggtttatggtgaagacgatgccacgcgtgcgacgccgcctacggtacgcgagctgtttagcgccgtgcggaaaaactatttccgcctctattttcactatatgtatttcaacatcgcccgcattctctatttgcaggtcgataacgttttcggtttgttcttgctgtttccgtcaattgttgccggtacgattacgctcggcctgatgacgcagattaccaacgtttttggtcaggttcgcggtgctttccagtacctgattaactcatggaccacactggttgagttgatgtctatctacaaacgtctgcgcagctttgaacatgaactggatggtgacaaaattcaggaagtaacccataccttgagctaaaaaggagaagtaatgtcgcgcgtcaatcctctatcttcgctgtcattgttggcggttctggttttagcggggtgtagtagtcaggctccgcaaccgttgaaaaagggcgaaaaagcgatagatgtggcgagcgtcgtgcggcagaagatgcctgcgagcgtgaaagaccgcgatgcctgggcgaaagatctcgccaccacctttgaaagtcaggggctggcaccgacgctggaaaacgtctgctcggtgctggcggtggcgcagcaggagtcaaattatcaggcagatccggccgttccgggcttaagcaagatcgcctggcaagagattgaccgtcgtgctgaacggatgcacattcctgcttttctggttcataccgcgctaaaaatcaaatcgccaaacggcaaaagttatagcgaacggttagattcggtgcgtacagaaaagcaattgagcgcgatttttgacgatctgatcagcatggtaccaatggggcagacgctgtttggttcgcttaatccggtgcgcaccggtgggccgatgcaggtcagcattgcttttgccgaacagcataccaaagggtatccgtggaaaatggacggtacagttcgtcaggaagtcttcagtcgccgcggcgggttgtggtttggtacttaccatttactgaattatcccgccagctatagcgcaccgatataccgctttgctgattttaacgctggctggtacgccagccgtaatgccgcgtttcagaacgcagtcagtaaggccagcggcgtgaagctggcactggacggtgatttaattcgttacgacagtaaagaacccgggaaaaccgaactggcaacgcgcaaactggcgggaaaactggggatgagcgacagcgaaattcgccgtcagttagagaaaggtgacagcttctcttttgaggagacggcgctgtacaagaaagtttatcaacttgccgaagcgaaaacgggtaaatcactaccccgcgaaatgttgcctggcattcaactggaaagcccgaaaatcacccgcaacctgactacggcctggtttgcgaagcgcgtagacgaacggcgggcgcgttgtatgaaacagtgatcaaacaggaatgtcatgccagataaggcgttttaggccgtatctggcaacgtaaatcttactggcggcgatgtcgccagtgcagccatagcgccaccactgcaaaaatgaggcagcctactaaaaacgggatcagcccgaaaatggtgccgacacctaaaccaatttccacccgtgggcgacctgtttcctggacctgcattaaacgctcatagacgccgggcgcatgcactaacaggttcagcaattgcgccccagcccaaaagcaaaacagcacaaacaacgcataggcaatgttgccaggcgttgaagaggcattgcgatattttccgctaaacagcgattttgacagggtgaaatcagccataaaaacctccggaagtcatctgcttctcttctggtgtgataccagtggcttatggcaagtctgacaggtcatttagattgtcaatatcagaatcatggtaaattgatgttgggaatattcccgaagcgtgaatcttcgttgtgagtcacaaaatggcaaccttaagttaaatttattaacaattacgaaaatgttgtctacaccacagacggttgttacagaatatgcaaggatgttgtttttcgttaacggagctgccatgaatctgcctgtaaaaatccgccgtgactggcactactatgcgttcgccattggccttatattcattcttaatggcgtggtggggttactgggatttgaagcaaaaggttggcagacctatgccgtcggtctggtgacgtgggtgattagtttctggctggcggggttgattattcgtcgtcgcgatgaagaaactgaaaacgcccaataagaatattatcgggcgttaaaatattacattgtggttttcaatgcgttatccgcagcgtgacgctccagcgccagctcaatcaaacgtgtgatcagatcggtgtaaccgagaccgctggcttgccacagcttcggatacatactgatgttggtgaagccaggcagtgtgttgatctcgttgatcaccacttcgttctctggggttaaaaacacgtctacacgcgccatgcctgcgcatcccaacgtctgataagcctgaacggcaatcgcccggatcttatcgttgatctctggtgcaatggctgccggaactaccactttcgcgccatcttcgtcaatgtacttggtgtcgtaggcatagaaatcgctggtgagtacgatctcgccacaggtgctggcttgcggattgtcgttgcccagaactgcgcattcgatctcacgacctttgatcccttgctcaacgatcactttatgatcgaactcgaacgccagatcgacggcaattgcgtactgttcttcactggttactttgctgacaccaacagaagagccctgattagccggttttacaaacagtggtaaccccagtttagactccacttcggcaaaactgatgttgtgacgattagcgcgcgtcagggtaataaatggcgcaatgttcagcccggcatcgcgtagcagacgtttggtgacatctttatccatacaggctgctgaagccagaacatcagaacctacaaacggtaaattggcgacccgcagcattccctgcaaggaaccatcttcgcccagcgtaccgtggacaatcgggaaaatgacatccaccgtcggcaacggctgaccgttttgcgcgtcgataagctgatgctcatgtttacctggcacctgcgcaaggctggtcgccgaagggcgcaacgcaatatgggcaggatcgtctgcatttagcagataattgctggcatcgctgacgtgccattgcccttgtttatcaatgcccagcagcacaacgtcgaagcgacttttatcaatggcatcgacaatgttttttgccgattgcagagacacttcatgttccgctgatttaccaccaaaaacgattcctacccgcagtttttccatcttaaaaacctatcccgtctaacacaaagtgcatacattaccacgacaaaacgggggattcgcggccttctgaaagattgttgcaatcttctgctgacgaagcgtgcaacgtactggtgaagaaagtgcgttatctcaaagatgtgcgcaagatcacaaaaatgatgaacgggaagctaatttattcctggcttaaatggccatgcggtgagtttttttctcttaattataagttaacgaagagaatatatttcataacttttatttataataaaggttgataattaaaagcctatattttgtgtgggtaattatttaaataagagaaacgtttcgctggtaatcaaacaaaaaatatttgcgcaaagtatttcctttgtcataaaaataatacttccagacactatgaagttgtgaaacataatgttaacttctccatactttggataaggaaatacagacatgaaaaatctcattgctgagttgttatttaagcttgcccaaaaagaagaagagtcgaaagaactgtgtgcgcaggtagaagctttggagattatcgtcactgcaatgcttcgcaatatggcgcaaaatgaccaacagcggttgattgatcaggtagagggggcgctgtacgaggtaaagcccgatgccagcattcctgacgacgatacggagctgctgcgcgattacgtaaagaagttattgaagcatcctcgtcagtaaaaagttaatcttttcaacagctgtcataaagttgtcacggccgagacttatagtcgctttgtttttattttttaatgtatttgtacatggagaaaataaagtgaaacaaagcactattgcactggcactcttaccgttactgtttacccctgtgacaaaagcccggacaccagaaatgcctgttctggaaaaccgggctgctcagggcgatattactgcacccggcggtgctcgccgcttaacgggtgatcagaccgccgctctgcgtgattctcttagcgataaacctgcaaaaaatattattttgctgattggcgatgggatgggggattcggaaattactgccgcacgtaattatgccgaaggtgcgggcggcttttttaaaggtatcgatgcctggtaatgactccaacttattgatagtgttttatgttcagataatgcccgatgactttgtcatgcagctccaccgattttgagaacgacagcgacttccgtcccagccgtgccaggtgctgcctcagattcaggttatgccgctcaattcgctgcgtatatcgcttgctgattacgtgcagctttcccttcaggcgggattcatacagcggccagccatccgtcatccatatcaccacgtcaaagggtgacagcaggctcataagacgccccagcgtcgccatagtgcgttcaccgaatacgtgcgcaacaaccgtcttccgaagcctgtcatacgcgtaaaacagccagcgctggcgcgatttagccccgacatagccccactgttcgtccatttccgcgcagacgatgacgtcactgcccggctgtatgcgcgaggttaccgactgcggcctgagtttttaagtgacgtaaaatcgtgttgaggccaacgcccataatgcgggcagttgcccggcatccaacgccattcatggccatatcaatgattttctggtgcgtaccgggttgagaagcggtgtaagtgaactgcagttgccatgttttacggcagtgagagcagagatagcgctgatgtccggcggtgcttttgccgttacgcaccaccccgtcagtagctgaacaggagggacagctgatagaaacagaagccactggagcacctcaaaaacaccatcatacactaaatcagtaagttggcagcatcacatcgatgccttaccgcttaccgggcaatacactcactatgcgctgaataaaaaaaccggcaaaccggactacgtcaccgactcggctgcatcagcaaccgcctggtcaaccggtgtcaaaacctataacggcgcgctgggcgtcgatattcacgaaaaagatcacccaacgattctggaaatggcaaaagccgcaggtctggcgaccggtaacgtttctaccgcagagttgcaggatgccacgcccgctgcgctggtggcgcatgtgacctcgcgcaaatgctacggtccgagcgcgaccagtgaaaaatgtccgggtaacgctctggaaaaaggcggaaaaggatcgattaccgaacagctgcttaacgctcgtgccgacgttacgcttggcggtggcgcaaaaacctttgctgaaacggcaaccgccggtgaatggcagggaaaaacgctgcgtgaacaggcacaggcgcgtggttatcagttggtcagcgatgctgcctcactgaattcggtgacggaagcgaatcagcaaaaacctctgcttggactgtttgctgacggcaatatgccagtgcgctggctaggaccgaaagcaacgtaccacggcaatatcgataagcccgcagtcacctgtacgcctaatccgcaacgtaatgacagtgtaccaaccctggcgcagatgaccgacaaagccattgaattgttgagtaaaaatgagaaaggatttttcctgcaagttgaaggtgcgtcaatcgataaacaggatcacgctgcgaatccttgtgggcaaattggcgagacggtcgatctcgatgaagccgtacaacgggcgctggaattcgctaaaaaggatggcaacacgctggtcatagtcaccgctgatcacgcccacgccagccagattgtcgcgccggataccaaagctccgggcctcacccaggcgctaaataccaaagatggcgcagtgatggtgatgagctacgggaactccgaagaggattcacaagaacataccggcagtcagttgcgtattgcggcgtatggcccgcatgccgccaatgtcgttggactgaccgaccagaccgatctcttctacaccatgaaagccgccctggggctgaaataaaaccgcgcccggcagtgaattttcgctgccgggtggtttttttgctgttagcaaccagacttaatggcaaatcacgggcgcatacgctcatggttaaaacatgaagagggatggtgctatgaaaattacattactggttaccttgcttttcggtctggtttttttaaccaccgtcggcgctgccgagagaacgttaaccccacaacaacagcgtatgacctcctgtaatcagcaggcgacggcgcaggcgttgaaaggggatgctcgtaagacctacatgagtgattgcctgaagaacagcaagtctgcgcctggtgaaaaaagtttgacgccacagcagcaaaagatgcgcgaatgtaataatcaagcaacgcaacaatctctgaaaggtgatgatcgtaataagtttatgagtgcctgcctcaagaaagccgcctgatacctgatagtgctaacgggtgagctacgaaagtggctcacccgaaatttcatacttctgcctttagccccgtctctataatttgggaaaattgtttctgaatgttcccaaaaataatgaatgatgaaaactttttcaaaaaagcggcggcgcatggggaggaacctcctttaactcctcaaaacgaacatcagcggtccgggctgcgcttcgcccgtcgcgtcagactaccccgtgcggttggcctggctggcatgttcttaccgattgcttcaacgctggtttcgcacccgccgccgggctggtggtggctggtgttggtcggctgggcgttcgtctggccgcatttagcctggcagatagcgagcagggccgtcgatccgcttagccgggaaatttacaacttaaaaaccgatgcagtattagcgggaatgtgggtaggcgtaatgggcgtaaacgtgctgccttccaccgctatgttgatgattatgtgtctgaatttgatgggggcaggcggcccccgtctgtttgtcgcgggtctggtgttgatggtggtttcctgccttgtcaccctcgagcttacgggcattaccgtgtcgttcaatagtgcgccgctggaatggtggctctcccttcccattattgtcgtttatcctctgctgtttggctgggtcagctaccagacggcaaccaaactggcggaacataaacgcaggttgcaggtcatgagtacccgcgacggcatgacgggcgtgtataaccgacgtcattgggaaactatgttacgcaatgaatttgataactgtcggcggcataatcgcgatgcaacgttactgattatcgatatcgaccatttcaagagcatcaacgatacctggggtcatgatgtgggcgatgaagcgattgtggcgcttacccgacagttacaaattaccctgcgcggtagcgatgtgattggtcggtttggcggcgatgagtttgcagtaatcatgtccggtacgccagctgagagcgccattaccgccatgttacgggtgcgtgaagggctaaacacgttacgcttgccgaatacgccacaggtaactttacggattagtgtgggggttgcgccgctgaacccacaaatgagtcactatcgtgagtggttgaaatcggcagatttggcgctttacaaagcaaagaaagccggacgtaaccgcaccgaagtggcggcctgacgtccggcgaaagtcatcaggatttgctgagtttttctgatttttccatacacttcgtcatcgcttcgatcactgcggcacggaagcctttctcttccagtacgcgtaccgcttcaatggtggtgcctcccggtgagcagaccatatctttcagtgcccccggatgttctcccgtttccagcaccatttttgcggaacccattaccgcctgagcggcaaatttatacgcctgggcgcgtggcatcccgcccagcacggcggcgtcggccatcgcttcgataaacataaatacgtaggctggcgaagaaccgctcacaccgaccaccgggtggatcatcggctcagcaattacttccgcttcgccaaagcagcggaaaatattcagcacatcagcggtatcttctggggttaccagcgcgtttggcgttacggaggtcatcccggcattaaccagcgcgggagtgttcggcatggcgcggataattttccggtcatggcccagcgcgcgggcaagctggtcgagcgtgacacctgcagcaatagaaacgaccagagagtctttattcaggctggaggtgatttcgctaagcactttaatcatgatgccaggtttaacggcagcaaaaatgatgtcggcgatttgcgccacttcttgcgccgattctgcggcgttgatgccgaactggtcatgcagggcggcgactttatccggggagggggtgtatacccagatttgccctggaagcacctgaccgctggcaatcagaccgccgagaatggcttttcccatattgccgcagccaataaaaccgattttcttttccattgcctcactcctgccgtgaaattcattgttttgataatcgctggcagaagcataaacagaactatgccggaaggcaaaagcgcgacacaatagaggattacccaacaaaggatgactttatgacaatttgggtggatgccgacgcgtgtcccaatgtaattaaagagattttgtatcgcgcggcggaacgtatgcagatgccgctggtactggtagcaaaccagagtttacgcgtgccgccatcgcgatttattcgtacgctgcgcgtcgcggcaggtttcgacgttgccgataacgaaattgtccggcagtgtgaagcgggcgatttggtgatcaccgcagatatacctttggctgctgaagccatcgagaaaggcgcagcggcgcttaatccgcgcggcgaacgttacacgccagcgaccattcgtgagcgcctgacgatgcgcgattttatggataccttacgtgccagtgggatccagaccggcggaccagatagcctttcacaacgtgaccgccaggcctttgccgcggagctggagaagtggtggctggaagtgcaacgtagtcgtggctaaatgtaatttattatttacacttcattcttgaatatttattggtatagtaagggatgtattgagattttcactttaagtggaattttttctttacaatcgaaattgtactagtttgatggtatgatcgctattctcatgacaccggctttcgccgcattgcgacctattggggaaaacccacgatgacacaacctctttttctgatcgggcctcggggctgtggtaaaacaacggtcggaatggcccttgccgattcgcttaaccgtcggtttgtcgataccgatcagtggttgcaatcacagctcaatatgacggtcgcggagatcgtcgaaagggaagagtgggcgggatttcgcgccagagaaacggcggcgctggaagcggtaactgcgccatccaccgttatcgctacaggcggcggcattattctgacggaatttaatcgtcactttatgcaaaataacgggatcgtggtttatttgtgtgcgccagtatcagtcctggttaaccgactgcaagctgcaccggaagaagatttacggccaaccttaacgggaaaaccgctgagcgaagaagttcaggaagtgctggaagaacgcgatgcgctatatcgcgaagttgcgcatattatcatcgacgcaacaaacgaacccagccaggtgatttctgaaattcgtagcgccctggcacagacgatcaattgttgattttagagcgcctatacttaacgttcatcccgtgaaataaggaagaacgatgccaacgaaaccgccttatcctcgtgaagcatatatagtgacgattgaaaaaggaaagccaggacagacggtaacctggtaccaactcagagccgatcatcctaaaccagactcgttgatcagtgaacatccgacggctcaggaagcgatggatgcgaaaaaacgctatgaggaccctgacaaagagtgaccgcatcagactgctcggaagggattctgagtgccactacaagggatctgcgtcacatttttcataattcatgtttttctaataattagaatattaaacaataacaatccattactggaatcatttggaatctttacattatgccgtgcacgtctgctgctacgctttttgtcatttgtagcacaagtaagtgtcagcagtggtgcttcacacttgcccggtaattaacgacgaaagaaaagtaaggtggatgaacaatgagtgcgtcgttggcgatcctgaccatcggcattgtacctatgcaggaggttttgccgctcctgacggaatacattgacgaagataatatttcccatcatagcctgctggggaagttaagtcgtgaagaagtgatggcggagtacgcgccagaagcaggcgaagacaccattctcacattattaaatgacaaccagctggcccatgtttcgcgtcgtaaagtggagcgagacctgcaaggtgtggttgaagtgctcgataatcagggttatgacgtcattttattaatgagtacagcaaacattagtagtatgactgcgcgtaatacgatctttcttgagccgtcgcgaatattgcctccactggtttcctctattgttgaagatcatcaggtgggggttatcgttccggttgaggagatgctgcccgttcaggcgcaaaaatggcaaattttgcagaaatcgccggtattttcattgggtaaccccattcatgattcagaacaaaaaatcattgatgccgggaaagaattactggcaaaaggggctgatgtcatcatgctggattgtttaggatttcaccaacgtcatcgcgatttactgcaaaaacagctcgatgttcctgtcttgctgtctaacgtattgattgcacggctggctgcggaattactggtgtaattttgcgtgacagtcagcgcctctggcccctatagtgaagtagatgttcaactaccaaacagggccagtttatgcttcaaagtaatgagtacttttccggcaaagtgaaatcaatcggcttttccagcagcagcactggtcgcgccagcgtgggtgttatggttgaaggcgaatacaccttcagcaccgctgagccggaagagatgacggtaatcagtggcgcgctgaatgtgttactgcctgacgcgaccgactggcaagtgtatgaagccggttcggtgtttaatgttcccggtcacagtgagtttcatctgcaagttgccgaacccacctcttatctgtgccgctatctgtaattcctcgccttccccttgaacgggagggcatttttctgaaatatcctctctttaacccataataatatttcctttgcttcgattttttcaatttccgatatattcataattcatcaaggttgatataaatatcagtgaagatctccaggtattttttgcggaactgatgacacaacgccccctggagcaagttacagcgggagatctatgaattactgacgccaacgatcaacctgcaaattcactgtacccgttatcccatgcgcagccaaaatggtggaagcaccgatttaccgcgttattggatcacgttggataaaaacgtgatctgggattacccgaaagactttattgcaggtaacggtggagtgcgtaattttcacggtgaaacttgctggtatccttacctgacggatatttgttcaatttctgatttattgcgtgaatatattgacaccccaaaagcggagttgttaacaaaacaatttaccagcgataaatgggggttagtgaatattctgcgtgctgctgacaggcgaatagggatgaggcgattagatcagttacggcgtaaaacgcataatattgctgcgctaaaaattattgcccgccgtagcgaataattatatgcctggtgtggcatcgtacgccggataagacgcggcaggcgtcgcatccggcattaaaggaaaatcagcaattaacgttgtgcttcgccacctaatccttcaatcaggttttgaattaacgctgccagttcaccagtcatcaggatgaaatcggcatcaaaacgctgggcgaaatcttcacggtcgatatcttcgttttgatcgcgcagctcgtcgcagaacttcagacgcttgagcgaaccatcgtcgcacatcacaaactgaatgcgctgctgccagtcgagcgccagtttagtcaccacttttccggcttcgatgtgattggtgatctcttcgctggtcagatcttgtttcttcgcacggatcacgccgccatcttccagcaacgatttcagctcggcttcatcaagcaactggaagccctgtgctgcgctaccggagcgaacccattcggttagcgtcagttcaatcgggttttccatgctcaatggtacaacaggtaacgaccccaggcttttacgcagtaatgccagcgtatcttccgcttttttggcgctggcgcagtccaccataatcaaaccattaaccgtgtcgatccacatcattgtctggctaaaacggctgaaagctcgcggcagcagagagtgcagcacttcgtctttcagcgaatctttttcggttttcttcagcttacgcgcctgttccgcttccagtttggcgattttcgcttccagcgcctgtttaatcaccggagacgggaggattttttcttctttgcgtgcgcagataacaatttgaccattggcaacgtgcgttaacgcatcgctgtgcgatcccatcggaggaacccagcccatcttcgccatgtcctggctgccacatggggtaaatgccatcgaggctagctgtttttccatctcttctgcacgcagcgaaatctcgcggctaagacggtaaaccattaaatttttgaaccacagcatgataatttccacggccttgtcgttaaatttagcgggcatgataacgaattgtcggcggccttgcattgccaatccggttgtccgtctctacgctattgatattgaaaaaaataaggagagtaccgtgcgtataggtatcgatttaggcggcaccaaaactgaagtgattgcactgggcgatgcaggggagcagttgtaccgccatcgtctgcccacgccgcgtgatgattaccggcagactattgaaacgatcgccacgttggtttatatggcggagcaggcgacagggcagcgcggaacggtaggtatgggcattcctggctcaatttcgccctacaccggcgtggtgaaaaatgccaattcaacctggctcaacggtcagccattcgataaagacttaagcgcgcggttgcagcgggaagtgcggctggcaaatgacgccaactgtctggccgtttcagaagcagtagatggcgcggcagcgggagcacagacggtatttgccgtgattatcggcacgggatgcggcgcgggcgtggcattcaatgggcgggcgcatatcggcggcaatggcacggcaggcgagtggggacacaatccgctaccttggatggacgaagacgaactgcgttatcgcgaggaagtcccttgttattgcggtaaacaaggttgtattgaaacctttatttcgggcacgggatttgccacagattatcgtcgtttgagcggacatgcgctgaaaggcagtgaaattatcagcctggttgaagaaagcgatccggtagcggaactggcattgcgtcgctacgagctgcggctggcaaaatcgctggcacatgtcgtgaatattctcgatccggatgtaattgtcctggggggcgggatgagcaatgtagaccgtttatatcaaacggttgggcagttgattaaacaatttgtcttcggcggcgaatgtgaaacgccggtgcgtaaggcgaagcacggtgattccagcggcgtacgcggcgctgcgtggttatggccacaagagtaaaaaaaccaggcaattggcgcatcatgcctgatgcgacgcttgccgcgtcttatcaggcctacaaaatgtgccagaaccgcgtagggcggataaggcgttcacgccgcatccggcaataagcaacgcgcaccgtgacagtaatctaccccagtggtttcgccagcaccggactatccgccgcttgctggcgcttatagcgaccatacagcagcaacgatgacatcgcagcaaacgaaagcagggcggcaggcagcgccacgtaattatatgccagccccagcgtcagcatcataccaccgcaatatgcgccgacggcgctaccgaggttaaacgctatttgcccacctgcggcacctaataactctccgcctttggcattttgcagtaacaatatttgcagaggtgctgaaagggcaaataatcccgcgcaacaaataaaagcaaaaataagcgacgttgttttcatgccgccgcagaaaaagagcatcagcagtgccagtacaattataaagtcagtcactgctgcaatgcgcagtggtgaataacgtcctgaaatcctgccacttagcatatttcccaacaccatccctagcccaactaacatcataataaaggtcatcgccgtttccgaaaaaccggaaataaacatcatgtatggctttacgtagctgaaccaggcaaacacacctgcgttgccaaacatcgtggcggcgaaaattaaccacggggccgggctgcgtaaaaagtgaaattgttcgcgcagctttcctttcgcctcgtcgcgaatatccggcacccaaaaatagaccgatgccatcaccgcaatattaaaaacagcgatcaataaaaaggtgtaacgccagctaaattcctgacttaaatacgttcccagcggaatgcccagcaaattggcgactgtcatcccggaaaccatccccgccacggcggcggtgacttttccgggtttgataatttttgataacacgatcgcgccgacgccaaaaaatgcgccatgcggaaagccggaaaccaggcgaccaatggcaagcatcaggtaagacgaagagagcgtgaacatggcgttgccaatgacgcacaacgccaccagaaacaacaagatatgtttgagtgagtagcggctggaaaagagtgcgatgattggcgcaccgaccaccactcccagcgcataatacgagatcatatgcccggcagcaggaatcgaaattcctacgttatgcgccagctccgtgagcacgcccataatgccaaattcggccatccccaaaccaaacgtgcccagagccaaagataaaatgacttttttcataccaccatcacaactaccagaacggctaccaatcaccgtagccaataaagtgatagcttgcaggataacgaccagcaaggccaagagataattcgcccctctgtattcattatcctgctgaatagttatttcactgcaaacgtactttccagtttgctgtagcctaggccgttgatctttttcactttgatctgcaccggaatacgctctttcatcgcttctacgtggctaatcacaccgatggttttgccactggcgttcagggcatccagcgcatcaagggcggtatccagcgtttcgctatccagcgtgccaaaaccttcatcaaggaacagcgagtcaatacgtgttttatggctgaccagatccgaaagcgccagcgccagcgccagactaacgaggaaactttcgccgccggaaagggtacgggtatcgcgtaccgcatctgcctgccaggtatcaacaacctcgacttccagcgcctcgctggctttgcgctgtaacagatagcgcccgtgcagccgggtaagttgctgattagcgagatggactaaattatccagcgtcagcccctgggcaaacttgcggaatttatcgccctctttggaacctattagcgaattcagatatccccagtcctcaacctgctgcgtcatttgagcaatttgctgcattaaggtttgttgttgctgacggttatctgcatcctgcttcagctgctggcgaatctcgccttgactcgtggtgttttcacgcaacttttggtgagtttgcgctaactcttgctgaatctgctccaccgtcacagtgagagccaacccgtcaggtcggtgttgttgatgctgtgccagcgtttctgctgtctgagtgaccagcgtttgcgcctgacggcgctggttttccagattctgcttgagctgttccagctgcgttagtgtttgttcatccattagcgccgcaaggaacgcctgctgatcgtcaaagacgctggcctgtagcgcggtgtcaaactgcgcctgggctttttgcagactttgcgccgccagaacatcctgttgctgtaacgtctgctgctggctgtgtaatgcgagacattgttcatgaacctgccgccagttatccagcgccacagtttcttcgctgtgcgggagatcatcactttgcggcaacgtttccagaatcggcgtcagctgctgaatacggttttgcagcgcggttaattcgttctggcgttgctgccagctctgcgcttcttgctgacgtgtcgccaaccagctctcttcttcatcttcctgtggcaatgtcagtgcataacccgccaatgccgttaagagctgctgctggcgttgttcaatttgctgttgatactggataatttgctgattatgcgcggcaatctgcccttgtaattcatgtcgttggctgagtaaccgcagctggcgttcgtgctcatcttgtgcatccagccacggttgaatatcgtcctgtggctgcaaggtgatattgaggctggccgtgacggcttgccattgttgagtaagtgcttgctcatcttgtcggaggctttgcgcttcgttttcatcgcgctgaagctgctttgttaaggcgtccagttgcccgcgcagcgccgcaccttcttcgccgagctttttaacttcgttttccagcgccagtaatcgagactgattaacaccaggctccagcgcctgatacgcctcgaccgccgggtggctggtggaaccacaaagtggacaaggctgacccgcctgtaactgtgcacgttgagcttccagcgttttgatgcgcgcttcctgctcgcaaatggttttcacatcggcaagttgctgcgtcttttctttataacgctggcgcatttcgttaagtgcggcgttacgttgcgtctgttcttgcgtgacattctggatagcgacctgtaactgcgccagacgtttttgttggggaacaatctgtccatgtagcgcgaccaggtgctgacgcagtgggcgttgctcagcatgttgcgccagggcggtagcaacttcatcggcggttaacgtcaacgtgatcgccgcaagcgcattaagtttttgctcagcatgggttaactgttgctgccattgccgcagatgctcgcgatcgctggtttgttgggagaactgcgcacgccaacccgccagttcgttgttccactgacggaagcggtcgtgttcctgtaaccaggtattcaggctttgttgctgctgctgtaattctgctgactgcttcgccgcgtggtggcgaatgctcgcgcgaagcgccattgtgctctgtaagcgagtatttacttcttcaatctgctggcgagtatgcgccagcgccgcgctgtgttctgcgatgcgttcccagtgcggacgaagatttcgtgccggttgtgccagactgagcgccgccagttgaggttgcgctttttcttcttcggctaacgcctgttgcaaggcctgctgacggcggctggcttcttgctgcaattcgtccagacgcgttaaccagtttagtgattgttgttcttgctgctgcgcggtaagtaactgtttttcttcgtcagtaagtacctgcaaactcgctgtcagcgattgcacttgttccggcgtgagcaacgcgacgccgctggcctgcgcttgcagcttctccagctcagtgcgggccgatttgtgctgctcaaaaaccatcgccgagatttgcccgtagatttcagtgccggttaactcctcgagcaattccgcgcgttctttgggtttggcattcaggaaggcagcaaattgcccctgcgaaagcagcatcgaacgggtgaagcgcccgtaatccagcccggttaacgtcgctgtcagttccagcttatctttcactttgtcggcgagaattttgccgtcggcgcagcgcgccagctctacgcgtggcacctgcaaattaccgtcgggttggttacgcgcccgattctggctccagaatgcacggtacgcttcacctttcacttcaaactccacctccgccagacattcggcggtatcgcgggtcatgagatcattttgcgattgtgaaacgttagagagacgcggagtttcgtgatacagcgccagacaaatggcgtccagcagggtggttttccccgcacctgttgggccggtaatagcaaacagcccgttgctggcgaacggctcgcgggtgaaatcaatcttccattcgccttttaatgagttcaggtttttcaggcgcaggctgagaattttcatgcttcgtgttctccggcgagggtatgcaacgtcgtggtgaaaagatgctgcagacgttgctgctgcgattcatccagttcttccagtgccagacggcgattgaacacctcttcgacgctgagttcgctgagggtttcacgctgttggctggctaacacacgctcgcgctgttcacgactccggcgtaccagcaatacttcaacaggcaatgattcggttaatgcctggattttgcgctgaatatcatgcagatactcatcagtagtgatttcgatatccagccagacaggcggctcctgtgatacatcgcgccactgttccagctgtgcggtaatcgacgccagatcgcctttcagcaccgccatgggttgcgttaccggtacgttcaggttttccacgctctctaatttgccgtttgaaaatgtcaccagatggacatatttactctttccgcattcatcaaaactcagtggaatgggagagccgcaatagcgaacatgttccatgccgccaataatctgtgcgcggtgaatatgcccgagcgcgatgtagtcggctggtggaaagttttgtgctggaaacgcgtccagcgtgccaatataaatgtcacgcacggcgtcacttttactggcacccacggtcgttaagtgtcccgtggcgatgatgggcagaggctgatcgccgcgcagtttgcaggcatcggcatattgttgttggtaataatcggtaatcgctgccagtaaatgctgctgtttttcaataccgttaagccccgcctggctggtaataatgtcacgcggacgtaaaaacggaatggggcacagcactgcgcctggcgtcccgtcgcgacgaggcaagatttgcggcgcatgtccggcgctggcgaccacggtcgtattgaggaacgccatgatatcgcgcgattcattcagcgtggcgaccgagtcatggtttcctgccagtaccaccagatgacagccagtttgctgtaaattgacaacaaaacggttgtataacgtgcgggcgtaactgggcggcgagccggtatcgaaaacatcaccagcaacaataatcgcatccacctgatgggtttgtgctgtttccagcagccagtcaagaaaagcctgatgttcagcttcgcggcttttactgtagaagttctggccgagatgccagtctgaggtgtgaaggatgcgcataacgattccctggcgaaaaagcatgggcgcgattatacccaaacagatgtgccatttgcttttttctgcgccacggaaatcaataacctgaagatatgtgcgacgagcttttcataaatctgtcataaatctgacgcataatgacgtcgcattaatgatcgcaacctatttattacaacagggcaaatcatggcgagacgtattctggtcgtagaagatgaagctccaattcgcgaaatggtctgcttcgtgctcgaacaaaatggctttcagccggtcgaagcggaagattatgacagtgctgtgaatcaactgaatgaaccctggccggatttaattctccttgactggatgttacctggcggctccggtatccagttcatcaaacacctcaagcgcgagtcgatgacccgggatattccagtggtgatgttgaccgccagaggggaagaagaagatcgcgtgcgcggccttgaaaccggcgcggatgactatatcaccaagccgttttcgccgaaggagctggtggcgcgaatcaaagcggtaatgcgccgtatttcgccaatggcggtggaagaggtgattgagatgcagggattaagtctcgacccgacatctcaccgagtgatggcgggcgaagagccgctggagatggggccgacagaatttaaactgctgcacttttttatgacgcatcctgagcgcgtgtacagccgcgagcagctgttaaaccacgtctggggaactaacgtgtatgtggaagaccgcacggtcgatgtccacattcgtcgcctgcgtaaagcactggagcccggcgggcatgaccgcatggtgcagaccgtgcgcggtacaggatatcgtttttcaacccgcttttaacgccttgctcatcggacgcagagcagggcttatgatttcttaactggagtatcttacgtgctggaacggctgtcgtggaaaaggctggtgctggagctgctactttgctgcctcccggctttcatcctgggtgcattttttggttacctgccctggtttttgctggcatcggtaacaggactgcttatctggcatttctggaatttattgcgcctttcatggtggctgtgggtggatcgcagtatgaccccgccaccggggcgtggtagctgggaaccgctactatacggcttacaccagatgcagctgcgaaataaaaaacgccgccgtgaactgggcaatctgattaaacgctttcgtagcggcgcggagtcgctgcccgacgcagtggtgctgaccactgaagagggcggtattttctggtgtaacggtctggcgcaacaaattcttggtttgcgctggccggaagataacgggcagaacatccttaacctgctgcgttacccggagtttacgcaatatctgaaaacgcgtgatttttctcgcccgctcaatctggtgctcaacaccgggcggcatctggaaattcgcgtcatgccttatacccacaaacagttgctgatggtggcgcgtgatgtcacgcaaatgcatcaactggaaggggcgcggcgtaacttttttgccaacgtgagccatgagttacgtacgccattgaccgtgttacagggttacctggagatgatggatgagcagccgctggaaggcgcggtacgcgaaaaagcgttgcacaccatgcgcgagcagacccagcggatggaagggctggtgaagcagttgctgacgctgtcgaaaatagaagccgcaccgacgcatttgctcaatgaaaaggttgatgtgccgatgatgctgcgcgttgttgagcgtgaggctcagactctgagtcagaaaaaacagacatttacctttgagatagataacggcctcaaagtgtctggcaacgaagatcagctacgcagtgcgatttcgaacctggtctataacgccgtgaatcatactccagaaggcacgcatatcaccgtacgctggcagcgagtgccgcacggtgccgaatttagcgttgaagataacggaccgggcattgcaccggagcatattccgcgcctgaccgagcgtttttatcgcgttgataaagcgcgttcccggcaaaccggcggtagcggattagggttagcgatcgtgaaacatgcggtgaatcatcacgaaagtcgcctgaatattgagagtacagtaggaaaaggaacacgtttcagttttgttatcccggaacgtttaattgccaaaaacagcgattaatccgcctttgtcatcttttattgccataagccagtcgatgctggcttattttctttgcagtcaaaatacgggcgttagattttacaacggttggtgattttttgttcgcatgattagccatgtctttttcacggaaatagtgttttatactggttggtgatttcttatcgctatatacccctggtttttagatccctccttgctttaaaacgttataagcgtttaaattgcgcttcaggtgctgtcatactgactgcattaacgcggtaaatcgaaaaactattcttcgccgcgcctggttgggagtatttcccgctaaaattgtttaaatataccgctgtatcatccccagggattggcacaaaaatttaacgttacaacaccacatccacaggcagtatgatttatgacccatcaattaagatcgcgcgatatcatcgctctgggctttatgacatttgcgttgttcgtcggcgcaggtaacattattttccctccaatggtcggcttgcaggcaggcgaacacgtctggactgcggcattcggcttcctcattactgccgttggtctgccggtactaacggtagtggcgctggcaaaagttggcggcggtgttgacagcctcagcacgccaatcggtaaagccgctggcgtactgctggcaacggtttgttacctggcggtggggccgcttttcgctacgccgcgtacagctaccgtttcctttgaagtggggattgcgccgctgactggtgattccgcgctgccgctgtttatctacagcctggtctatttcgctatcgttattctggtttcgctctatccgggcaagctgctggataccgtgggcaacttccttgcgccgctgaaaattatcgcgctggtcatcctgtctgttgccgcgattgtctggccggcgggttctatcagcacggcgactgaggcttatcaaaacgctgcgttttctaacggcttcgttaacggctatctgaccatggatacgctgggcgcaatggtgtttggtatcgttattgttaacgcggcgcgttctcgtggcgttaccgaagcgcgtctgctgacccgttataccgtctgggctggcctgatggcgggtgttggtctgactctgctgtacctggcgctgttccgtctgggttcagacagcgcgtcgctggtcgatcagtctgcaaacggcgctgctattctgcatgcttacgttcagcacacctttggcggcggcggtagcttcctgctggcggcgttaatcttcatcgcctgcctggtaacggcagttggcctgacctgtgcttgtgcagaattctttgcccagtacgtaccgctctcttatcgtacgctggtgtttatcctcggcggcttctcgatggtggtttctaacctcggcttaagccagctgatccagatctccgtaccggtgctgaccgctatttatccgccgtgtatcgcactggttgtattaagttttacacgctcatggtggcataattcgtcccgcgtgattgctccgccgatgtttatcagcctgctttttggtattctcgacgggatcaaagcatctgcattcagcgatatcttaccgtcctgggcgcagcgtttaccgctggccgaacaaggtctggcgtggttaatgccaacagtggtgatggtggttctggccattatctgggatcgcgcggcaggtcgtcaggtgacctccagcgctcactaaatcactgaacatttgttttaaccacggggctgcgatgccccgtggttttttattgtgttgatgggttaggaattgatggaaagtaagaacaagctaaagcgtgggctaagtacccgccacatacgctttatggcactgggttcagcaattggcaccgggctgttttacggttcggcagacgccatcaaaatggccggtccgagcgtgttgttggcctatattatcggtggtatcgcggcgtatatcattatgcgtgcgctgggggaaatgtcggtacataacccggcagccagctctttctcgcgttatgcgcaggaaaacctcggcccgctggcaggttacattaccggctggacctattgctttgaaatccttattgtcgccatcgccgatgtgaccgcttttggtatctatatgggtgtctggttcccgacggtgccgcactggatttgggtactgagcgtggtgctgatcatttgcgccgtaaacctgatgagcgtgaaggtcttcggtgagctggaattctggttctcgttctttaaagtcgccaccatcatcatcatgattgtcgccggtttcggcatcatcatctgggggattggcaacggcgggcaaccgaccggtattcataacctgtggagcaacggcggcttcttcagtaacggctggcttggcatggtaatgtcgttgcaaatggtgatgtttgcttacggtgggatcgaaattatcgggattaccgccggtgaagcgaaagatcctgagaaatcgataccgcgtgcgattaactccgtgccgatgcgtattctggtgttctacgtcggtacgctgttcgtcattatgtctatctacccgtggaatcaggttggcactgccggtagcccgttcgtgctgacgttccagcatatgggcattacctttgccgccagcattcttaactttgttgtgctgactgcttcgctgtcggcaattaacagtgatgtatttggcgtaggccgtatgctccacggtatggcagagcagggcagcgcgccgaaaattttcagcaaaacgtcgcgtcgcggtattccgtgggttacggtgctggtgatgactaccgcgctgctgtttgcggtgtatctgaactacatcatgccggaaaacgtcttcctggtgatcgcttcgctggcaaccttcgccacggtgtgggtgtggattatgatcctgctgtcgcaaattgccttccgtcgccgtttgccgccagaagaagttaaggcgctgaaatttaaagtgccgggtggggtagcaacgaccatcggcgggctgattttcctgctctttattatcgggttgattggttatcacccggatacgcgtatctcgctgtatgtcggtttcgcgtggattgttgtgctgttgattggctggatgtttaaacgccgccacgatcgtcagctggctgaaaaccaataatacttgcgttctgtaagccggttcaggaggaaatcctgatccggctattccgaaagttatccgcccccgtcctcctcccccaaatatccttcagatgatgagtgatcctgcattaggctatggcaaggtgatcagattttcatcacaggggaattatgatgttaaatgcatggcacctgccggtgcccccatttgttaaacaaagcaaagatcaactgctcattacactgtggctgacgggcgaagacccaccgcagcgcattatgctgcgtacagaacacgataacgaagaaatgtcagtatcgatgcataagcagcgcagtcagcagcagcctggcgtcaccgcatggcgtgcggcgattgatctctccagcggacaaccccggcggcgttacagtttcaaactgctgtggcacgatcgccagcgttggtttacaccgcagggcttcagccgaatgccgccggcacgactggagcagtttgccgtcgatgtaccggatatcggcccacaatgggctgcggatcagattttttatcagatcttccctgatcgttttgcgcgtagtcttcctcgtgaagctgaacaggatcatgtctattaccatcatgcagccggacaagagatcatcttgcgtgactgggatgaaccggtcacggcgcaggcgggcggatcaacgttctatggcggcgatctggacgggataagcgaaaaactgccgtatctgaaaaagcttggcgtgacggcgctgtatctcaatccggtgtttaaagctcccagcgtacataaatacgataccgaggattatcgccatgtcgatccgcagtttggcggtgatggggcgttgctgcgtttgcgacacaatacgcagcagctgggaatgcggctggtgctggacggcgtgtttaaccacagtggcgattcccatgcctggtttgacaggcacaatcgtggcacggggggagcttgtcacaaccctgaatcgccctggcgcgactggtactcgtttagtgatgatggcacggcgctcgactggcttggctatgccagcttgccgaagctggattatcagtcggaaagtctggtgaatgaaatttatcgcggggaagacagtattgtccgccattggctgaaagcgccgtggagtatggacggctggcggctggatgtggtgcatatgctgggggaggcgggtggggcacgcaataatatgcagcacgttgctgggatcaccgaagcggcgaaagaaacccagccggaagcgtatattgtcggcgaacattttggcgatgcacggcaatggttacaggccgatgtggaagatgccgccatgaactatcgtggcttcacattcccgttgtggggatttcttgccaataccgatatctcttacgatccgcagcaaattgatgcccaaacctgtatggcctggatggataattaccgcgcagggctttctcatcaacaacaattacgtatgtttaatcagctcgacagccacgatactgcgcgatttaaaacgctgctcggtcgggatattgcgcgcctgccgctggcggtggtctggctgttcacctggcctggtgtaccgtgcatttattacggtgatgaagtaggactggatggcaaaaacgatccgttttgccgtaaaccgttcccttggcaggtggaaaagcaagatacggcgttattcgcgctgtaccagcgaatgattgcgctgcgtaagaaaagtcaggcgctacgtcatggcggctgtcaggtgctgtatgcggaagataacgtggtggtatttgtccgcgtgctgaatcagcagcgtgtactggtggcaatcaaccgtggcgaagcttgtgaagtcgtgctacccgcgtcaccgttgctcaatgccgtgcaatggcaatgcaaagaagggcatgggcaactgactgacgggattctggctttgcctgccatttcggctacggtatggatgaactaacgttttataacgccttgtgtgacgcctgcgccatcatccgcggataaaactgccagaagcgggtttcgagggcgtcataatgagcgtctaaatcgtaccaggagtcacgcagggcatccagacgtgggcggcggcttgccatgccgtttaacacgttctggatgaaatccatatcgcgatagcgcaccagccactgctctgaccacaagtaattgttcagattgataaaacgtggcggtgagtccggcaaaatcgtcatcacttgctcgcgggcataacagacaaattcctgtagcggaaagtccggcgacagctgcgaccagtggcgggaaagaaagtgatcccacatgacatccagcgtaataggcgcaacgcggcgagtttcactacgaaaccattcccgtgcttcgcggacttccggcagattgtcggttaatacgtcgatacgtcgatgcatatgaatgccagccacgacgtcgggcggaaaactttcttcaggatttccgcgtacgaaatcagccagtaaattgccggaaagcgagctttccgcgagatgggctaaatgcaggtgagctaaaaaattcatcgattatattctatccaaaagggggtaaaggttgcagggagagcgccccggcactagactacccgcctcttattttagtctgagtcagtgtcatgcgcgttaccgatttctcctttgaattgcccgaatccctgattgcccactatcccatgcctgaacgcagtagctgtcgtttactgtcgctggacgggccgacgggcgcgctgacgcacggtactttcaccgatttacttgataagctcaaccccggcgatcttctggtttttaataatacccgcgtgatcccggcgcgcctgtttgggcgtaaagccagcggcggcaagattgaagtgctggttgagcggatgctcgacgacaaacgcattcttgcgcatattcgcgcctcgaaagcgccaaaacctggcgcagaactgctgctgggcgatgacgaaagtattaacgcaacaatgaccgcgcgccacggcgcactgtttgaagtcgaattcaatgatgatcgttcggtactggatatcctcaacagtatcggccatatgccgctgccgccgtatatcgaccgtccggacgaagacgctgaccgcgaactttatcaaaccgtttatagcgaaaaaccgggcgcggttgcagccccgaccgctggtctgcattttgacgagcctttgctggaaaaattgcgcgccaaaggcgtggagatggcgtttgtgacgttgcacgttggtgcgggcaccttccagccggtgcgcgtcgacaccattgaagatcacatcatgcactcggaatacgctgaagtaccgcaggatgtggtagacgcggtactggcggcgaaagcgcgcggtaaccgggtgattgcggttggcaccacttcagtacgttcgctggaaagcgcggctcaggcagcgaaaaacgatctcattgaaccgttcttcgacgatacccaaatctttatctatccgggcttccagtacaaagtggtcgatgcgctggtgacgaacttccacttgccagagtcgacgctgattatgctggtttcggcctttgccggttatcaacacaccatgaacgcctataaagcagcggtagaagagaaatatcgcttttttagttacggtgatgcgatgtttatcacgtacaatccgcaggcaattaatgagcgcgtcggggagtaattccgcggcgctggtttaaaacgttggactgtttttctgacgtagtggagaaaaaatgaaatttgaactggacaccaccgacggtcgcgcacgccgtggccgcctggtctttgatcgtggcgtagtggaaacgccttgttttatgcctgttggcacctacggcaccgtaaaagggatgacgccggaagaagttgaagccactggcgcgcaaattatcctcggcaacacctttcacctgtggctgcgcccgggccaggaaatcatgaaactgcacggcgatctgcacgattttatgcagtggaaggggccgatcctcaccgactccggcggtttccaggtcttcagccttggcgatattcgtaaaatcaccgaacagggcgtgcacttccgtaacccgatcaacggcgatccgattttcctcgatcctgaaaaatcaatggagattcagtacgatcttggttcggatatcgtcatgatctttgatgagtgtacgccgtatcctgctgactgggattacgcaaaacgctccatggagatgtctctgcgttgggcgaagcgtagccgtgagcgttttgacagtctcggaaacaaaaatgcgctgtttggtatcattcagggcagcgtttacgaagatttacgtgatatttctgttaaaggtctggtagatatcggttttgatggctacgctgtcggcggtctggctgtgggtgagccgaaagcagatatgcaccgcattctggagcatgtatgcccgcaaattccggcagacaaaccgcgttacctgatgggcgttggtaaaccagaagacctggttgaaggcgtacgtcgtggtatcgatatgtttgactgcgtaatgccaacccgcaacgcccgaaatggtcatttgttcgtgaccgatggcgtggtgaaaatccgcaatgcgaagtataagagcgatactggcccactcgatcctgagtgtgattgctacacctgtcgcaattattcacgcgcttacttgcatcatcttgaccgttgcaacgaaatattaggcgcgcgactcaacaccattcataaccttcgttactaccagcgtttgatggcgggtttacgcaaggctattgaagagggtaaattagagagcttcgtaactgatttttaccagcgtcaggggcgagaagtaccacctttgaacgttgattaatattaataatgagggaaatttaatgagcttttttatttctgatgcggtagcggcaacgggtgcaccggcgcaaggtagcccgatgtctttgattttgatgctggtggtattcggtctgattttctatttcatgatcctgcgtccacagcagaagcgcaccaaagaacacaaaaagctgatggactccattgccaaaggtgatgaagttctgacgaacggtggcctggttggtcgcgtaaccaaagtagcggaaaacggctacattgctatcgcgctgaatgacaccactgaagtagttattaaacgtgacttcgtagctgccgtcctgccgaaaggcaccatgaaggcgctgtaattaaaatttttccctaagggaattgccgtgttaaaccgttatcctttgtggaagtacgtcatgctgatcgtggtgattgtcatcggtctgctgtatgcgcttcccaacctgtttggtgaggatccggctgttcagatcactggtgcgcgcggagtcgccgccagtgagcaaacgctgatccaggtccagaaaacgttacaagaagaaaaaataactgctaagtctgtggcactggaagagggcgctattcttgcgcgcttcgactccactgacacccagctgcgcgctcgtgaagcattaatgggcgttatgggtgacaaatacgtcgtggcgcttaaccttgccccggcaacgccgcgctggctggcagctattcacgctgagccgatgaagctcggccttgacctgcgtggcggcgttcacttcctgatggaagtggatatggacaccgcgcttggcaaactccaggaacaaaatatcgatagcctgcgcagcgatctgcgtgaaaagggcatcccgtataccaccgttcgtaaagaaaacaactacggcctgagcattactttccgcgatgctaaagctcgtgatgaagccattgcgtatctgagcaagcgccatccggacctggtgattagtagccagggcagcaaccagctgcgtgcggtaatgagcgatgctcgtctgagtgaagcgcgtgaatatgcggtgcagcagaacatcaatatcctgcgtaaccgtgtaaaccaacttggcgtggcggagccggtggttcagcgtcagggtgctgaccgtatcgttgttgaactgccaggtattcaggacactgcgcgtgcgaaagagattctgggtgcgacggcaacgctggaattccgtctggtaaacaccaacgttgaccaggccgctgcggcatccggtcgcgtaccgggcgactctgaagtgaaacagacccgcgaaggtcagccagttgtgctgtacaaacgcgtaattctgaccggtgaccatatcaccgactccacttccagccaggacgaatacaaccaaccgcaggttaacatctcgctcgatagcgctggtggtaacatcatgtctaacttcactaaggacaacatcggcaaaccgatggcaaccctgtttgtggagtacaaagacagcggtaagaaagatgcaaatggtcgtgcggttctggtgaaacaggaagaggtgattaacatcgccaacatccagtctcgtctgggtaacagcttccgtatcaccggcatcaacaacccgaacgaagcccgtcagctgtcactgctgctgcgtgccggtgcgttgatcgcgccgattcagattgttgaagaacgtaccattggcccaaccctgggtatgcagaacattgaacaggggctggaggcttgccttgccggtctgctggtttctattctgttcatgatcatcttctataagaagtttggtctgattgcgaccagtgctctgattgccaacttgatcttaatcgtcggcattatgtcgctgttgccaggcgcaacgctgagtatgccaggtatcgcgggtatcgtcttaacccttgcggtggcggtcgatgcgaacgtactgatcaacgaacgtattaaagaagagttgagcaacggacgtactgttcaacaggcaattgatgaaggttatcgtggcgcattcagttctatcttcgatgcgaacatcaccacgctgattaaagtcatcatcctgtacgcagtgggtaccggggcaattaaagggttcgcgattactaccggtatcggtgtggcgacgtcgatgtttaccgcgattgtcggtacgcgtgccatcgtaaacctgctatatggcggcaagcgcgtcaagaagctgtcaatctgaggagtgcgatgtggcacaggaatatactgttgaacaactaaaccacggccgtaaagtctatgactttatgcgctgggactactgggctttcggcatctctggtctgctgttaatcgccgctatcgttattatgggcgtgcgcggctttaactgggggctggatttcaccggtggtacggttatcgaaattacgctcgaaaaaccggctgaaattgacgtaatgcgtgatgcattgcaaaaagccggttttgaagagccaatgctgcaaaactttggtagcagccacgacatcatggtccgtatgccgcctgctgaaggcgaaaccggcggtcaggtgctgggcagccaggttctgaaggtgattaacgaatccaccaatcagaatgcagcagtgaagcgtattgagttcgtcggtccgagcgtgggggcagaccttgcgcaaaccggtgcgatggcgttgatggcggcgctgctgtctatccttgtgtacgtaggttttcgctttgagtggcgactggcggcaggggtcgttattgcgctggcgcacgacgttatcattacgctgggtattttgtcgttattccatatcgagattgacctgaccattgtggcatcgttgatgtcggttatcggttactcgcttaacgacagtatcgtggtatcggaccgtattcgtgaaaacttccgcaagatccgtcgcggtacgccttacgaaatctttaacgtgtccttgacccagacgctgcaccgtaccttgatcacatccggtactaccttgatggttatcctgatgctgtacctcttcggtggtccggtactggaaggcttctcgctgaccatgcttatcggtgtttccatcggtactgcatcttccatctatgtggcatctgcgttggctctgaaactgggtatgaagcgcgaacacatgttgcagcagaaagtggaaaaagaaggggcggatcagccgtcaattctgccgtaatcaagttcccgttgatgttgaaaatcccggtcagaagatcgggatttttttgatgtatggagattgctaaaatccccgcatcttgggaaactgcgcgtaaccctacatttcatccaggtaactcttcatggctatcatcccaaaaaactatgcgcggttagaaagcggctatcgcgaaaaagcattaaaaatatatccgtgggtctgcggtcgctgttcccgcgagtttgtttattccaacctgcgtgaacttactgttcaccacattgatcacgaccataccaataacccggaagatggcagtaactgggaattgctttgtctctattgccacgatcatgagcattcgaaatataccgaagcggatcagtatggtacgaccgttatcgcaggggaagatgcgcagaaagatgtcggtgaagcgaagtacaacccattcgctgacctgaaagcgatgatgaacaagaagaagtgattaaaacgtaaaattgcctgatgcgctacgcttatcaggactacgttatttcagcaatatattgaatttacgtgcttttgtgggtcggacaaagcgtttacgccgcatccggcatgaacaaagcgcacgttgttaacaatctgaaatgccgggaataaatcccggcattttcataatcagaagttgtaacctactaccaggtaaccaccccagccggtagagcgaacgttgaagttgccgttgccgaagttcagttctgcatcgtcgttccactgaccaccgtcgtgccagtaacgagctacgacagagtagtgccagtgatcgtagttcagagccagaatatggctggaagcgatagagttattagtacgggtcttaataccgttgattgcgttaccgctgtcatcccctaaatcggaaccccagtcgaagttggtgaagccgatgtagctcagctgaccgccccacagatcggtaatcggcacaaagtatttaattttgaaacggtaaccgtcccactcgttttcgttcgctgcgccatagttctgccactggtatttcgcatagacgttcatggacaggctcatcggcagaccagtatcgatgtcggtacccagacccatgtaccaggtgctctggcgaccatctttattacgacccatgtcgtaaatgtagttgttcgcgaagtaccactctttgaacggaccgaagctaaggtcagtattggtcagcttgtcgatggagaaacgtggttcgatttccataaacagcggagaaccgtggttccagatacctttagcatcggagttaccgccgaagaataccggcgcatccgcataaccatagaagtcgaaccagtcttttttagcgaatgcttcgtactcaaggtaggtatcgttgcggatctgcggtccgaaacgggtgtgatagcttccgacaacgttaacgctctggtgccaccagtcggaaagatactgcggtttgtcgttttcagctgcgttgacagtaaaagacgaagagagcgccagtaccgcaccggctgccagtaatgtttttttcatatgtatgccactgtttgaaaatcccttgcgggagtgaaaaaggcgcaaattgcgtttctaaatatttcgtatacagaggagcctattataaaaatcattgctcacaaaaatatgtttcgtttcacagttctatcatttacgtaatcgattgcgttcacgtttacacacattcgggcagggattgtactgactttcacccttgttgcaaacttttactatcaatcagggtgatgtaagcggagtaacaaaatgacggggaaagatgttgcgagacgcacaaaatcgccccgaaatacgtttactgcataacaggttgaatatcgtggatacgtacgaagtctaactgttctacagaaataccctttaactgtaacggaatatcaacatcgctgggggcgaggacgctggcaggggcattaatcaattgattctgcacattgatttcctgaaagttgtctattgttccctgaatttgcccatattcaacagttccgctgaatgcgggcaagggatcattcgactcgccctgaatacgtagcgtcagggtggtgccatctgcatcaggcgtaatattcaccagcgacatacgtaaagtaccgatctggctttccagtcttgccggtgttttcgctcctggcagaaggtaaaccccactgctggattttgcattcagcctgttttgctgagtgattttgaccgtttctttattgagttgcgtcatctcctagttcagcgtgctgacgctgtgtttcatctgtcgcacttcgctctgctgcacacaggcgctaaggctgaacaggcttcccagcaggagcagtcgaaaaacgttagtattcataggtcgtccctttctcgtcgcaattagcctaatggtagagggtaaaagcagcgaaagcatcgatcctttatctcaaaagcgttgcgcctttgttgtatcgtcagttcagggtaaaatagatttctgttaaccacctggtcaggacgccgtatgcattgcccattctgtttcgccgtggacactaaggtaattgactctcgtctcgtgggcgagggttcatccgtacgccgccgtcggcagtgtctggtgtgtaatgaacgtttcaccacctttgaagtggcggagctggttatgccgcgtgttgtaaaaagcaacgacgtgcgtgaaccgtttaatgaagagaaattgcgtagcggaatgctgcgggcgctggaaaaacgtccggtgagttccgatgacgtcgaaatggcaatcaatcatattaaatcgcagctgcgcgccaccggtgagcgcgaagtgccgagcaagatgattggcaatctggtgatggagcaattgaaaaagctcgataaagtcgcctatatccgttttgcctctgtctaccgcagtttcgaagatatcaaagaatttggcgaagagatcgcgcgcctggaggactaagccgtgcaggacgagtattacatggcgcgggcgctaaagctggcgcaacgaggacgttttaccacccaccccaacccgaatgtcgggtgcgtcattgtcaaagatggcgaaattgtcggtgaaggttaccaccaacgagcgggtgaaccacatgccgaagtacacgcgttgcgtatggcgggtgaaaaagccaaaggcgcaacggcgtatgtgacactcgaaccctgtagccatcatggtcgtacgccaccgtgctgtgacgcactcatcgccgctggcgtagcgcgcgtggttgcctcgatgcaagatcctaacccgcaggtcgctgggcgtggactttaccgtctgcaacaggctggcattgacgtcagccacgggctgatgatgagtgaagccgagcaattgaataaaggctttctcaagcggatgcgcaccggctttccttatattcagttaaaacttggcgcatcgcttgatggccgcacggcgatggcgagcggcgaaagccagtggatcacttcgcctcaggcgcggcgcgacgtacaacgacagcgcgcacaaagtcatgccattttaaccagcagcgccacggtgctggcggatgatccagccttaacagtgcgttggtctgaactggatgaacaaactcaggcgctctacccgcaacaaaatctccgccagccagtacgtattgtgattgatagccaaaatcgcgtgatgccggaacatcgcattgtgcagcagcccggcgaaacctggttcgcgcgtacgcaggaagattctagtgagtggccggaaacggtgcgtaccttgctgattccagagcataaaggtcatctggatctggttgtactgatgatgcaactgggtaaacagcaaattaacagcatctgggtggaagcggggccaacgctcgctggcgcattgctgcaggcgggtttagtcgatgagctgattgtctatatcgcacctaaactattaggcagcgacgcccgcggattatgcacgctgccagggcttgagaaattagccgacgccccccaatttaaattcaaagagatacgtcatgtaggcccggatgtttgcctgcatttagtgggtgcatgatctcccggctcgaaagggaagcagcgcacgaaatattatgctaaaatccgcccccctgcggggccatactcgaacccgaaggaagaaaatgaacattattgaagctaacgttgctaccccggacgctcgcgtcgccatcaccatcgcgcgtttcaacaactttatcaatgacagcctgctggaaggtgcaattgacgcactgaaacgtatcggtcaggtaaaagatgaaaacattaccgttgtttgggtgcctggtgcctatgagctgccgctggcggcgggtgcactggctaaaaccggtaaatacgacgcggtgattgcgctgggtacggttattcgtggtggcactgcccactttgaatatgtcgctggtggtgcaagcaacggcctggcgcatgttgcccaggacagcgaaattccggttgcttttggggttctgaccactgaaagcattgaacaagcgatcgaacgtgctggcaccaaagctggcaacaaaggtgcagaagctgcactgaccgcgcttgaaatgattaatgtattgaaagccatcaaggcctgaaattagtaaggggaaatccgtgaaacctgctgctcgtcgccgcgctcgtgagtgtgccgtccaggcgctctactcctggcagttgtcccagaacgacatcgctgatgttgaataccagttcctggctgaacaggatgtaaaagacgttgacgtcctgtacttccgtgagctgctggccggggtggcgactaataccgcatacctcgacggactgatgaagccatacctgtcccgcctgctggaagaactgggacaggtagaaaaagcagtactgcgcattgcgctgtacgaactgtctaaacgtagcgatgtgccatacaaagtggccattaacgaagcgatcgaactggcgaaatcgttcggcgcagaagacagccataagttcgtcaacggcgtactcgataaagcagcacctgtgattcgccctaacaaaaagtgatatccaggccggtagattcacggaagaccgttccatgatcgccggccttttcttttttacctgctgaggcataacgtatggcatgtggcgagttctccctgattgcccgttattttgaccgtgtaagaagttctcgtcttgatgtcgaactgggcatcggcgacgattgcgcacttctcaatatccccgagaaacagaccctggcgatcagcactgatacgctggtggcgggtaaccatttcctccctgatatcgatcctgctgatctggcttataaagcactggcggtgaacctaagcgatctggcagcgatgggggccgatccggcctggctgacgctggcattaaccttaccggacgtagacgaagcgtggcttgagtccttcagcgacagtttgtttgatcttctcaattattacgatatgcaactcattggcggcgatactacgcgtgggccattatcaatgacgttgggtatccacggctttgttccgatgggacgagccttaacgcgctctggggcgaaaccgggtgactggatctatgtgaccggtacaccgggcgatagcgccgccgggctggcgattttgcaaaaccgtttgcaggttgccgatgctaaagatgctgactacttgatcaaacgtcatctccgtccatcgccgcgtattttacaggggcaggcactgcgcgatctggcaaattcagctatcgatctctctgacggtctgatttccgatctcgggcatatcgtgaaagccagcgactgcggcgcacgtattgacctggcattgctgccgttttctgatgcgctttctcgccatgttgaaccggaacaggcgctgcgctgggcgctctctggcggtgaagattacgagttgtgtttcacggtgccggaactgaaccgtggcgcgctggatgttgctctcggacaccttggcgtaccgtttacctgtatcgggcaaatgaccgctgatatcgaagggctttgttttattcgtgacggcgaacctgtcacgtttgactggaaaggatatgaccattttgccacgccataaagatgtcgcgaaaagtcgcctgaagatgagtaatccgtggcatctgcttgctgtcggattcggaagtggattaagcccgatcgttcctgggacgatgggctcgctggcagcgattccgttctggtatctgatgacctttttgccctggcagctctactcgctggtggtgatgctggggatctgtatcggcgtctatctttgtcatcagaccgcaaaagatatgggcgtgcacgatcacggcagcattgtctgggacgaatttattggtatgtggatcacgctcatggcgctgccgaccaatgactggcagtgggttgccgccgggtttgtgattttccgtattctggatatgtggaagccgtggccgatccgctggtttgatcgcaatgtacatggcggcatggggatcatgatcgacgatattgtcgccggggtgatctccgcaggtatcctgtactttatcggtcatcactggccgctgggtattctgtcgtagttgtgcaccagtgccttatgtgacgcttgtcacgtctcatcaggcctggactcttatttaaatcctacgaccgcatgcggtttatacggcgtttccagttcggcaatctgttctggcttcaaagtgatatccaccgcgttcagcagctcatcaagctgttcttcccgcgatgtaccgataatcggtgcggcaatgcccggtttactcaacaaccaggccagcgcaacttgtgctcgtgttgcaccgagttcttcactgacgcccgttaaccgctctgcgatctgcgcgtcattttcatcgctttctttatagagatttttccccacctcatcagacaccagtcgtgcggtagtttctccccacggacgcgtcagtcgcccccgcgccagcgggctccacggaatcaccgccacgccctcctgataacacagtggcagcatctcgcgctcttcttcgcgataaatcagattgtagtgatcctgcatactgacaaactgcgcccagccgtgctgtttttggagttccagtgcctgagcaaactgcgaagcgtgcattgatgacgcgccgatataacgcgctttcccggcttttaccacgtcgttcagagcttccagcgtctcttcgatcggcgtgttgtaatcccagcgatgaatttgcaggatatcgacataatccatgccgagacgtcgcaggctgtcgtcgatagagcgcaaaatttgtgcacgggataatccttccggtaaatcaccaacgcgatggaacactttcgtcgcaacgaccacgtcttcacgacgggcgaaatcccgcagtgcgcgaccaacgatctcttcgctgctgccatcggaatagctattggcggtatcaaagaaatttatgccgccttccagtgcacgtttaattatgggacggctgctttcttccggcagtgtccatgcgtgattaccgcgatctggctcgccaaaggtcatacagccgaggcaaagtcgggaaacgcgaaggtcggtttttcctaaggggttgtattgcatgctgccactcctgccatgaataatttcttaagcatagcaggagtggagtagggattatgccagccaggccttgattttggcttccataccggcggcaccgaggccgagttcggcgcgcatttcttcctgagttccttgtggaataaagaagtcaggcaggccaatgttcagcacgggtactggtttacgatgggccattagcacttcgttcacgccgctgcctgcgccgcccataatggcgttttcttctacggtgaccagcgcttcatggctggcggccatttccagaattaacgcttcatcaagcggtttcacaaaacgcatatcgaccagcgtagcgttcagcgattcagcgactttcgccgcgtctggcatcagcgtaccaaagttaaggatcgccagtttctcgccacgacgcttcacaatgcctttgccaattggcagtttttccagcggcgtcagttccacgccaaccgcgttaccgcgcgggtagcgcaccgcggacgggccgtcgttatagtgatagccggtatagagcatctggcgacattcgttttcatcgctcggggtcataatgaccatttccggtatgcagcgcaggtaagagaggtcaaaagcgccctgatgggtttgaccgtcagcaccaacaatgcccgcgcggtcgatggcgaacaggaccgggagcttttgaatcgccacgtcatgcagcacctgatcataggcgcgttgcaggaaagtggagtaaatcgcgacaatgggtttgtacccaccaatcgccagaccggcggcaaaggtcaccgcgtgttgctcggcgattgccacgtcgaagtaacgatccgggaatttacgtgaaaactcgaccatgccggaaccttcacgcatcgccggagtaatcgccatcagcttgttgtctttcgctgccgtttcgcacaaccagtcgccaaagatttttgaatagctcggcaaaccgccgctacttttcggcaaacaaccgctggagggatcaaatttaggcacggcgtggaaagtgatggggtctttttctgccggttcataaccacgaccttttttggtcatgatatgcaggaactgcgggcctttcaggtcgcgcatgttcttcagcgtggtgataagccccagcacatcgtgaccgtcaaccgggccgatgtagttaaagcccagctcttcaaacaacgtgccaggcactaccatgcctttaatatgttcttcggtacgtttgagcagctctttaattggcggaacgccagagaaaacttttttcccgccttcgcgcagtgaagagtaaagcttaccggaaagcagctgcgccagatggttgttgagcgcgccgacattttcggaaatcgacatttcgttgtcgttgaggaccaccagcatatcaggacggatatcgcccgcgtgattcatcgcttcaaacgccatgcctgcggtaatcgcgccatcgccgattacacagacggtacggcgatttttgccttctttctcggcagcaaccgcaataccaattccggcactgatggaggttgatgaatgcccgacgcttaatacgtcatattcgctttcgccgcgccacgggaacgggtgcaggccgcctttctgacggatggtgccgattttgtcgcggcgtccggtcaaaattttatgcggataagcctgatgccccacatcccaaatcaattggtcaaacggggtgttgtagacatagtgcagcgccacggtcagttcgaccgtgcccagcccggaggcgaagtgcccgctggaacggctcacgctgtcgagtaaatagcggcgcagttcgtcgcagagtttcggtaaactctctttcggcaacagtcgtaactcctgggtggagtcgaccagtgccagggtcgggtatttggcaatatcaaaactcatcaggggcctattaatacttattgtttatttattacgctggatgatgtagtccgctagcgcttccagtgccgaggtatcgagtgattgttcagccagttgtttcagcgactgacgggcatcgtcgatcagatcccgggctttcttccgggcttgctcaagacccagaagtgcagggtaggtacttttaccaagttgctggtcggcaccctggcgttttcccaacgttgcagtatctcctaccacatccaggatgtcatcctgaacctggaaggcaaggccgatgctctctgcgtacttgtcgagtactggcagagcacgacgccctttatctccggcgcttaatgcaccaaggcgaacggcggcgcgaatcaatgcgccggttttatgacgatgaatacgctcaagcgcgtccagaggtacgtgtttgccttccgcgtctaaatctaatgcctgaccaccgcacattccggcaataccgctggcgctcgccagttcagaaatcatcgaaattctgtcgcgatccgacacttccggcatattggcatcgcttagaatcgagaacgccagcgtttgtaaagcgtcgccagcgagaatcgcgtttgcttcgccaaacttcacatggcaggtcggcaaaccgcgacgcagatcgtcatcatccatcgccggtaaatcatcatgaattaatgagtaagcgtggatacactctacggcggcagcgggtgcgtccagcgtgtttgtgctaacgccaaacatatgaccggtggcataaaccaggaagggtcgcagacgcttaccacctaataatgcgccatactgcatggtttcgaccacgggagtgttctgaaagggcagtggggcgataaaacggctcagcgcctggttggcctgcttaacgcaggcttcgagttgctgcggaaagtccattactcattgtccggtgtaaaaggggttagagaggcgtcttcattgtcagacagcagaatttgtacgcgctgttcggcttgttgtaatttggcctgcccctgacgtgccagctgcacgccgcgttcgaactcgttcagcgcctcttccagcggcaggtcgccactttccagacgggttacaatctgttccagctcgctcagcgccttttcaaagctggcgggagcctcatttttcttcggcataatgaatgtctgactctcaatatttttcgccccgtcatggtaacggactcagggcaaatagcaaataacgcgcaatggtaaggtgatgtgcgcagcaaagcgatgttagtggtatacttccgcgcctggatgcagccgcaggtgtgggctgctgtatttttccctatacaagtcgcttaaggcttgccaacgaaccattgccgccatgaagtttatcattaaattgttcccggaaatcaccatcaaaagccaatctgtgcgcttgcgctttataaaaatccttaccgggaacattcgtaacgttttaaagcactatgatgagacgctcgctgtcgtccgccactgggataacatcgaagttcgcgcaaaagatgaaaaccagcgtctggctattcgcgacgccctgacccgtattccgggtatccaccatattctcgaagtcgaagacgtgccgtttaccgacatgcacgatatttttgagaaagcgttggttcagtatcgcgatcagctggaaggcaaaaccttctgcgtacgcgtgaagcgccgtggcaaacatgattttagctcgattgatgtggaacgttacgtcggcggcggtttaaatcagcatattgagtccgcgcgcgtgaagctgaccaatccggaagtgactgtccatctggaagtggaagacgatcgtctcctgctgattaaaggccgctacgaaggtattggcggtttcccgatcggcacccaggaagatgtgctgtcgctcatttccggtggtttcgactccggtgtttccagttatatgttgatgcgtcgcggctgccgcgtgcattactgtttctttaaccttggcggcgcggcgcatgaaattggcgtgcgtcaggtggcgcattatctgtggaaccgttttggcagctcccaccgcgtgcgttttgtcgctattaatttcgaaccggtcgtcggggaaattctcgagaaaatcgacgacggtcagatgggcgttatcctcaaacgtatgatggtgcgtgccgcgtctaaagtggctgaacgttacggcgtacaggcgctggtcaccggcgaagcgctcggccaggtgtccagtcagacgctgaccaacctgcgcctgattgataacgtctccgatacgctgatcctgcgtccgctgatttcttacgacaaagagcacatcatcaacctggctcgccagattggcaccgaagactttgctcgcacgatgccggaatattgcggtgttatctccaaaagcccgacggtgaaagcggttaagtcgaagattgaagcggaagaagagaaattcgacttcagcattctcgataaagtggttgaagaagcgaataacgttgatatccgcgaaatcgcccagcagaccgagcaggaagtggtggaagtggaaaccgtcaatggcttcggcccgaacgacgtgatcctcgatatccgttctatcgatgaacaggaagataagccactgaaagtcgaagggattgatgtagtttctctgccgttctataaactgagcaccaagtttggcgatctcgaccagaacagaacctggctactgtggtgtgagcgcggggtgatgagccgtctgcaggcgctctatctgcgcgagcagggctttaacaatgtgaaggtatatcgcccgtaatttgtggttgtaacgtcgcatctggtcagatgcgacgcttaccgcatccgacactactcgtaataattataaatccctgccgccatcaccagttgtgatgccacttcatgggctttctcgcgcccaaccagcaggtcgataattttcagaccaaagtcgatagctgtccccggcccctggctggtcagcaattttacccgtgcatcccagacgacgcgcttgtcctgccattgttcagcgggaattttgtctttcagcgtcgggaagccggtcatattaccaatcgggaagatatcgtgcggcaccagcacggtggctggcgcggcgcaaatagccgcgacgatacgcccggaacggtggaactgtttaacggtttcaaccagcagggtactatcgcgaaaacactctgcgcctttaatgccaccaggcagtacgatcacgtcatattcgccatcagccacctcgaccagcggcgcatccgccagcagcttcacgccgcgcgagcaggtaatggccaggttgccatcgctggcgacgctggcagtggtgactttgataccgccgcgaaccagcagatcgatagtggtgacggcttcagtctcttcactaccaggggcgaggcaaaccagtgccgatgcgctcatattcactctcctttctttttaccatttcaaacaggcgggtgttttccggtacggcaatcccatgcgcgcgggcgcggcgtaagagaaaaccattgatatagtcgatttcggtgtggcgcagcgcgcggatatcctgcaacatcgacgagatattttccgctgtggcatcaatcacctgcatcacgtaatcacgcaaatcttctgctgaagtatgatgcccttcgcgctcgatcactgccgcgacttcttcgcatatctgcataatttcttgcggatgatgacgtaattcaccattcgggcaattccagatggcggtcagtggattaatcacacagttgacggccagcttgcgccacagctcggcgcgaatattgttatgccaggcaacgtcaggcaacacggtttgcaaaatatccgccagataactgtaatcgccatcctgttgccgtgccggaccaatatgcgtgattccgtttgccacatgaataatgacattgccgtcgcggcgggcggcatgggtggtggtgcccatcagtaatggctgctgaatgttttgcaactcttcgatggtgcccatgccgttgtgaattaacagtattggcgtggttacaggcagtgtggacgcgaggcttttgacggcatcgtaaacctgccatgctttcagcgtcaccaggagcagatcgctggtggcaagaaaatcgggatcgttggcggtcagcgattcgttaaatatcgaaccatctgtctcaaccagattcacgctacaataaggttgcggtacgcgcagccagccctgaacttcatgaccctgtttgcaaagtgctgtaagccataattgccctaaggcaccgcatcccaatacggtaattttcattgttcctcctcacccgcaaccactccgggtgttcaataaggctatcccttaattgtgcatgctgttgcgactatgcacaattaagggatacgtcctggtgcaggactgtcggttatttaactttgcgggtattatgcttcgcatcaaaaatgaagggagaggaaaagatgccatctttcgatattgtctctgaagttgatcttcaggaagcacgtaacgcggtcgataacgcgagccgcgaagtggagtcccgttttgacttccgtaacgttgaagcctcatttgagctgaacgacgccagcaaaaccatcaaagtgttgagcgagtccgatttccaggtcaatcagttgctggatattctgcgtgccaagctgctgaagcgcggcattgaaggcagttcgctggatgtaccggagaatatcgttcatagcggtaaaacctggtttgtggaagcgaaactgaaacagggcattgagagcgcgacccagaagaaaatcgtcaagatgatcaaagacagcaaactgaaagtgcaggcgcaaattcagggcgatgaaatccgcgtaacgggcaaatctcgtgatgatttgcaggctgtcatggcgatggtacgtggtggcgatctcggtcagccgttccagttcaaaaacttccgcgattaatcgcgactatgtgcgttttgttcatgtcagatgcggcatgaacgcctgattcggcctacaaaggtttgtaattcagaaactttgtaggcctgataagcgtagcgcagcaggcaattcgccgcgttttttatgcctgacgaattgcctgttctatctcaaagcgattcgtcactttgctgtcgattttcacataagctgaatgttcttcttctgcaatcaacacttctttgatgccttcagtttccagcaaacgcacttttaacgcttcgtttgcggcaatgtccgccgggatttcaatgcgcaaactgctgacatacggcggttctttcatggtactggcgactgccagccacactgcggccagcattgcgccagcgagaaataccccctgaccgtcaaacatgccgtcaatccagccgcccagcgaaccgccaatcgccacgccaagaaactggctggtggagtagacacccatcgccgtacctttgtaacctgctggcgactctttactgataagtgagggcagaagggcttccatcaaattaaacgccacaaagaaaagctgcacgccgaccaccagttgccagaactgcgtttgtgcgttccacaacacaatttccgcaaccacgatcaacccgacgcagaagacaaagacttgcttcattttgcgcttaacttcagcgtagataatgaaaggcacgaccgagccaaaggcgattaacatcgtcgccagatagaccttccagtgttcagccgccgggaaccccgcatcagctagctgtccgggcagggcaacaaacgtagacatcagaagcatgtgcagacacataatgccaaagttgagttttagcagccgcggttccgccagcactttactgaaactgcctttcaccattccggactcacgattaagtacgtgagtgctactgttgggcacaacccaaatggtcaacgcaatgccggttgttgccagaatagcgatcatccagaacagcgcgtgcagcccaagtttgtgagtgatgatcgggccaagcaccatcgcaatggcaaaggtaatgccaaagctcacgccgataaacgccatcgctttggtgcggttttgttcgcgcgtgagatcggaaagcagcgccataacggcggcggcaattgctccagagccttgtagcgcccggcccagaataattccccagatggagtcggaaagcgcagcgataacgctaccggcggcaaacaccgccagcccaccgacaattaatggtttgcgaccaatgcggtcggaaagcaggccaaacggaatctgaaaaacggcctgagtcagaccataaataccaatggcaataccgattaatgcttcgctggcaccttgcagagccatgccgtacgtggtcagaaccggcagaaccataaacatgcccagcatgcgcaacgagaatacggtccctaaaccccaggtcgcgcgcctctcacctggcgtcattttataatcgttcattaccaccccttaaaaaaatgcccacatagtgtagtgcggagcgcatgttgggtaaacagagtgttaatgagaaaatattacagaggagagtaatttgtgtgtcaggtatgtttttttgcattcataaaatgaatgctctatatgttgaaaaaatgaattttaaaactaaatagttttacatcaaaaaagtaataatatcatttcttgattgctatgtgcattttttatcttacgaatatgctagttttatctcactaaataaacgatttggtgacatggatgataatgtttcaggctaaatgtgtgcttattacttggacctttatggcactgtatttattcattaaatggatatttggtggttaattattatggaaatatatgacagtgaggacataaaggtatacatgttaactaaaagaatattattttctgtaatgctgatagtttcaccaagcgtggtggccagcgagaaagcgcatgaattgtatgacagcatatacggtggtaaacctgctcccgatgttataaatacactgcataaaatggctgaatcgggagatatcgacgcgcagagcctgttaggctgggaatattatcagcctcgttatgataccaaacctgatgttcaggaagcgattaaatggttcgagttagcggctaaacaaggtgacagagaagctccgttagcgctggggggtatctactacgacggtgagcaggtgcgggtggattatgccaaagcgtatgcactatttaatcaggccgcgcagcacggtgggaatttagcatggtccaggttgggcattatgtacgccaatggtcagtatgttgaggtagattgtaagaaagcgaaggaatatcttgataaaggtgtccacatttatggtggcccagaagactttctggctacttgtcgaaaagacatgattgacagaaaaacggttgacgatacgttacccgtgattacggttacccgttctgggatgcgagataattttttagataaaggtttttcctgcatggatagcctcttcgccaccaccaataaattaggcgaagtggccaatcttcgcgtgacattcagcattcgtcgcctatccggtaaggagattaaccaaacggttggcttcgcgcctttcggtttaaaccggctgaatattagctttactgattacctatttggttcatttaccagtaattcgtctcttattctttataaaccggaatttgagcgaaaatcttgtgcaactgtaaggaccacaatcgttgccgcaacggcaaccattaacggcaaggatgtggagttgctgaaagcgggggcaattgaacaaaagtggtaacgctgctcagcccccggctgaggcaaaacttgccctggcgggtggcgataataatctaagccgcgagaatatgctgaatcgccaaaaacataggtacagcaccaaaagcatttggtgtcgctgaaagctgaacaaagccgagacgagcataaaaattaatggcggcagggtcagcatcaagataaacccctttaattggtaatgcctggtgaattatttttacatgttcaaaaaatcacatagtaggtcctgaccaaagccccgcttttgatacttccgtgctacccccaacatgactaatctgacaacaccaatttctgaaggttgtgaaccctgaaggacgccagaaacgcgttgtttttccagcgaatatgccgtaaaagtacagatgccgatcagttcaccactttgtctgtcaataagtgctttagccgcacagtcgctattacgcacacttttctttagcgatgcgcgtacaaatttatcgataacagggttaccgcaatcaaactgtttttgcccaggataagtaatatcagactgataattacaggagaggactatgggcagagtaatctcttcatgcttgtcgaccatcgctgtttttccttttcattaacgccttgagggcgagcgtcggttgagcaggttcagcgatgagttggttcatcagttcccagctttgattcgaaagctcacggcgacgttggttatcaagcacactttcggcgcgttccatagcagcgctcaaaataaaagcgcttaaatctaccccaacggcttgcgcagcttcacgaagtttgtttttggcgtcgggactagttttgagttcgacccgcgcatttttcagcgttttatcgacatcgggtagagtggctgtttttccaggcattatgacctctttgattaactgaatgaaatcgtagggagtcgatctcatacataatacggctatcaaccgtatgattaatttatgttcatctgctcactctgtcaagatatacggttattagccgtatctctgatctcagacaataaaaaaggtgccgtagcacctttttaatagagaggttttgttaccacacagcagccagcagcgtatgcgagtccggtaccataaaatcaacggacatcatcaccgagagggcagtgatggcgatgatagagaagccgaacagcttgcgcgcccagattctgtcatcagcaactttataaccgcgcagagccatacctaaccaccagacgctaaccgccgcggcgaccaccagatatttatatccagcgtaaccgccaagagagagcatcagcgtggcaacggcaaaggcgatgatatacagcgtgatgtgattcttcgccaccgaaatgccttttaccactggcaataccggaatgtttgccgcctggtaatccttaaagcggaaaatggcgatggcataggagtgaggcatctgccacaggctgaagatagccagcaggatcgctgcgccgctatcgaactcgccggttactgcacagtagccaatcaccggcggcgcagcgccggagagcgaaccaatcaatgtgccgtagactgagtggcgtttcatgtacaggctatagacgccgacataaaccacaaagcccatcacccccagccagcaggccagcggattcgcgccaaaccacagcagcataaagccagcaatacccagcaaggtggcgtacaccagcgagacagcaggagagatcaggcctttaaccagcacccgattcttcgtcctttccatctttctgtcgatatccctgtcgatgtagttgttaaacacacaacccgacgccacaaccagtgacaccccaaccagcgtgtagataaacaggggataatcaatgctgccctttgaggccagcaggaatcccccaatcaccgagatcaggttgccaaagatgatgcctggtttcgttacttgcaggtattgcttaaacatcataaccgccgctcttagtgcatcatcatgttgtagttgaggttccacataatccagatggagcctacaaccaggatagcgatgattagcacggtgaagacaaacgccgtcatgttccagccttcatctgatttggtattcatgtgcaggaagcacaccagatgcaccagaacctgtaccactgccattgccaggattgttcccagaattacggccggagaggcagcccctgtcatcaccatccagaacggaatcaccgtcagaatgatcgacaggataaagcctgtcatgtaggtttttacgctgccatgggacgcgccgctgtgatcggtagaatgactcattacatcgcccccatcagataaacaacagtgaacacacagatccaaaccacatccaggaagtgccagaacaggctcaggcacatgatgcgggtacggttagtgctggtcaggccgcgacgagcgatttgtaccatcagcaccgccatccagataagaccggaagtgacgtgcagaccgtgcgtgccgaccagcgcaaagaacgctgacaggaagccgctgcgatccggacccatgccgttaacaatcaggtgatggaattcgtagatttccatcccgataaatccggcaccaaacaaccaggtcaacgccagccaggagataacctggcttttgttgtttttgtacatggcgatagccgccatgccgtaggtgatggagctgaacaacagcaagaaagtttcaaccagaacgaacggcagttcgaaaatgtccttacctgtcgggccgcctgcggtgccgttcaccagaacggcataggtagcaaacaagattgagaacagaatgcagtcgctcatcaggtagatccaaaatccgaagattttggttccgcctgcatcgtggtgcccgtgttcgtgcgcgtgggcagtcgcgtgcgtcaaagtatcagttgccatttttcagccctgccttagtaatctcatcgaaatgctggttttccagtttttcgatttctgccaccggcacgtagtaatccacgtcctcgtcgaagcttttcacgatccaggtgatgatcatgcctgcgaagccaacaatcgccagccaccagatatgccagatcatggcgaaaccgaagatggtggagaaagctgcaatgacgatacctgcaccgctgtttttcggcatatgaatttcttcatagtggtcaggctttttatacgcttcgcctttctctttcatttcccagaatgcatcacgctcgtgaacgtgcggcacaacggcaaagttatagaacggaggcggggaagaggttgcccactccagcgtacggccaccccacgggtcgccagtcaggtcacggttctggtcgcggtcgcgaatagaaacgtacatctgaataacgaggcagagaatacccagcgcaatcagtactgcaccgctagctgcaatcatcagcatggtgtggaactgcgggtcaatctgctggctcaaacgacgggtcatgcccatgaagcccagcgcatacagcggcataaaggcaacgaagaagccgatgatccagaaccagaacgcgcgtttaccccaggtttcattcagtttgaaaccgaaggctttaggccaccagtaggtcatccctgcgaagcagccgaagaccacgccgccgatgatcacgttatggaagtgcgcaatcaggaacaggctgttatgcagaacgaagtccgcgcccggtactgccagcagcacgccagtcatcccgcccaccgagaaagtgacgataaaaccgatggtccacagcatcgcagaatggaacacgatgcggccctgatacatggtgaacagccagttgaagatcttcaccccggtcgggatggcgataatcattgtggtgataccaaagaaggcgtttacgttcgcgcccgcacccatcgtaaagaagtggtgcagccaaacgatgaacgacagcacggtgatacagacggttgcccataccagcgaggtataaccaaacagacgtttacgcgagaaggttgccgcaatttcggagaacacaccgaaaacaggcaggatcaggatgtaaacttccgggtggccccaggcccaaatcaggttgatgtacatcatcatgttgccacccatatcgttggtaaagaaatgggtgcccagatagcgatccagggtcaacaacgcgacggtaaccgtcagaattgggaaggaagcaataatcagtacgttcgcgcacagtgatgcccaggtaaatactggcatcttgaacatggtcatgcccggtgcgcgcatcttcagaatggtaacgaagaagttgataccggtaagcgtcgtacctataccggatagctggagactccatatccagtaatcgacaccgactcccggactgtactctattcccgatagcggtggataggccagccagccggtctgcgcaaattcgcccacgccgagagaaacgttaaccagaatcacaccaacaacagtaaaccagaagcttaagttgttgaggaacgggaacgcaacgtcacgcgcgccgatctgcagcggaaccaccaggttcatcagaccgataacgaaaggcatcgccacgaagaagatcataatcacgccgtgcgcggtgaagatctgatcgtagtggtgaggtggcaggaagcccgcttcgcccgccgaggcaagagcctgctggctacgcatcataatggcgtcagcaaaaccacgcagcaacatcacaatcgccacgatgatatacatgataccgaggcgtttatggtcgacggaggtcagccactctttccacaggtaggtccacttaccgaagtaagtgatcaggccaacgagcgccagacctcccaaaataatgccagcgatcgtaaccatgacgataggttcatggaacgggactgcatcaagtgataattttccgaacatctttattcttcctcaacccctttaatgggcggattccgcgtggctcatgtccatgccttccataccttcgtgtgcactgtgctcaccttctggctgggtcatgtccatgctcttaccgtgagccataaacttgttaatcacatcggcaaacaagtctggtttcacgttggagaaatattccacctggttgtattcgctaggcgcggccagtttttcgaacgcagccatgtcagacatggtgttcggcgactgtttcgcttttgcgacccattggtcgaattcggcgcgatccggtgttgcaatagctttgaacttcatgcctgagaagcccggcccgctgtagctggcggagataccgtcataagtaccgggttcgttggcgatcagatgcaggcgagtctgcataccggccatggcataaatctggctacccagacgcggaatgaagaaggagttcatcacggagttggaggtcactttgaagtacaccggagtgttcgccgggaaagcgatttcattcacggtagcaatgccctgttccgggtagatgaagaaccatttccagtccatggaaaccacttcgatggtaatgggcttctcgtcgtgtgccagcggcttgctaggctcaagagcgtgagtggttttccaggtcagtaccgcaaggaagatgatgattaagataggtaccgtccagaccacagcttccactttattggagtgtgaccagttcgggctgtacttagcatctttattgctcgcacgatacttccaggcgaaaccaacagccatcaagattgcgggaataacgacaatcaacatcaggccaaatgccgtcagtatcagtgaacgttgctccagaccaatctgtcctttgggatctaacagcgcagaattacagccactgagcaatacagtgcctgcaaataatgacaaccatcccaaacttttattgtatttcctgagtctcatttaacgacctcaattccacgggatctggtggcgtttaaagtgtgtgggcattttacgggaaggttacattactgtaaacatgattaaattcctgttacttggatttggctgtcaggtcacatatgttgcaaaacatatcaagttgattttaagaagctgttgcaaaagggcgttataacgaaaggggagtgcagaaggagtttggacgggcaattggtataaccaatctggaataaaacaattgtttaacaaataattatcattatggtgacaattgggtgggggaaaataaagactcattagctgaatcgtgtaagaaaaaatagaattcataaattgcgtcaataatttccaaacgctaagccgcacaaaagaacaaatattattaagcgatactgatgtttatttagccgtaataattacggcgagtgattactacagctaaataatatttacagattacgtcagatgcgtttttcgtagcgccagataatccagcaaaccaccaagcacgacgccagaaagggcgactaaaaccccgacttccagcagagcaggcaggaaagagaagtgcgtcaaatccagcgcgtccatcgtcaacagcagtaaccacacggccaacaggctgacgcccgccgccagtgtccacatggcaaaggcataacctgccggatattcggtacgggagataaagttgtcatttactcgtgtatattcaagcgtctggcggcaaaccagcagcaaaataagccccggtacggcagcggcgacggagaatagatagaatgtcgaccagccgtgtgcttcaacaaaccaacccgccacggggccgacataaactcgccctacagcggaaagcgctgagagcagggcaaattgagttgcggaaaatgacttattacacagcgtcattaacagcgcgacaaaggctgatgtgcccatcccgccacagaggttttcgaaaaagacggctgcgcccatgctgtagagatgcttatcagtaatcgacagcagccagtaaccagcgttagacgcaccttgtaaaatgccgaaaatcagcagcgcccggaacagcgacaggcgctgcatcaaaatcccaccgtacaatgcgcccacaatggtcgccagtaagccaagcgttttgttaaccacgcctacttcacccgcatcaaacccgacgccgcgaatcaaaaacgtggttgtcaggctcatggcgaatgcgtcgcccagcttatacagcacgataagaagcaaaataagccaggcattattgcgaccaaagaaatctcgcagaggtgcaacaaccgcttgttccagcgtttttggcacaggaatggtgtcggtcggttctggtgcaagcaacgtcgcgataatacaagggatcaacagcgccgccatcaaccagtacatgccctgccagcccagccatttatctgccagccacagggctaagccgccggaaaccagcatccctaaacggtaacccagcacgctgattgccgcgcccgcaccacgttcttctgccgggagcacatcggttttccacgcatcgaagacaatatcctgggaggccgagcaaaaagcgatcaccaccgccagtgccgccatccagcggagttgggtgccaggttcgagaaaacccatcgccgcaatggcgactaataacaggatttgcgtggcgagcagccaaccgcgccgccgcccaaaaaatgggggcgtgtagcggtccatcagcggtgaccagaggaatttaaaaacgtaagcctggcctaccagagagaagaaaccaatggttttgagatcaatattctcgaccgtcatccaggcctgtaaggtaccggatgtcagggcgagcggtagcccggaagcaaaacccaggatcagcaatatggctgaacgcggctgttgaaaaatacgtaaatattgactggacatgggcgtctacaggcccggtttgcaccgggccagagggcagaaattaacgcgcgttctgcttgataaattcgtgaatgctggtgtcctgagacatatcagcgatggtatcggtcagcacactgttaaccgcatcggcgatatttttgttggaggcctggaacgcaccttcaacgttgtagctggcacgatagtttttggtcattttgttgccattctgcgcggtagcgatgatggcgatatccgctttggtagcgatgttatagcgcacgttgccctgggacacgtcagcatacagttggctaacgatgatttgcagattaaccgggccattcggaccaaccatgtaaccacgcgcggtcatctgtttttccagcacttcttgcagcaggaaacgcagatcgcgggaggcggtcagggtaacgatttgattatcgcgggtgacttttgccagcgcctgatcggtacgctgatcggcaccattaatgcttacggtgacgcccatcaggcttggatcctgctgtggcagtgtaatcgtcggggaaacttcaatagttgttggcggttttgcgcatcctgcaagcataaacagagcaactaacgggaagaggatttttttgaacatgttcgggctctcagagactcttaagcgtgtttggtaaaaattcccgccatcataacattgccaacggcgaggggaagtgggtaaggcatgtaaattcatcatgttgacgaaataatcgcccctggcaaaagaaacactgatgcgaggcctgtgtttcaatctttaaatcagtaaacttcatacgcttgacggaaaaaccaggacgaaacctaaatatttgttgttaagctgcaatggaaacggtaaaagcggctagtatttaaagggatggatgacatctcagcgttgtcggaggagatatttcatgatgatacgtgagcggatagaagaaaaattaagggcggcgttccaacccgtattcctcgaagtagtggatgaaagctatcgtcacaatgtcccagccggctctgaaagccattttaaagttgtgctggtcagcgatcgttttacgggtgaacgttttctgaatcgtcatcgaatgatttacagtactttagcggaggaactctctactaccgttcatgcgctggctctgcatacttacactattaaggagtgggaagggttgcaggacaccgtctttgcctctcctccctgtcgtggagcaggaagcatcgcgtaaaaacgcatttgcaactgtcggcgcttttccagtatgttgctaaagattttatgaaaaacggcctacgggccgttttgttttgtctgaattttgcgctttttgcccagcattcagacgaaaattgcccgggaattgtgaaaaaatacgcgacagcgcgcaataaccgttctcgactcataaaagtgatgccgctataatgccgcgtcctatttgaatgctttcgggatgattctggtaacagggaatgtgattgattataagaacatcccggttccgcgaagccaacaacctgtgcttgcggggtaagagttgaccgagcactgtgattttttgaggtaacaagatgcaagtttcagttgaaaccactcaaggccttggccgccgtgtaacgattactatcgctgctgacagcatcgagaccgctgttaaaagcgagctggtcaacgttgcgaaaaaagtacgtattgacggcttccgcaaaggcaaagtgccaatgaatatcgttgctcagcgttatggcgcgtctgtacgccaggacgttctgggtgacctgatgagccgtaacttcattgacgccatcattaaagaaaaaatcaatccggctggcgcaccgacttatgttccgggcgaatacaagctgggtgaagacttcacctactctgtagagtttgaagtttatccggaagttgaactgcagggtctggaagcgatcgaagttgaaaaaccgatcgttgaagtgaccgatgctgacgttgacggcatgctggatactctgcgtaaacagcaggcaacctggaaagaaaaagacggcgctgttgaagcagaagaccgcgtaaccatcgacttcaccggttctgtagacggcgaagagttcgaaggcggtaaagcgtctgatttcgtactggcgatgggccagggtcgtatgatcccgggctttgaagacggtatcaaaggccacaaagctggcgaagagttcaccatcgacgtgaccttcccggaagaataccacgcagaaaacctgaaaggtaaagcagcgaaattcgctatcaacctgaagaaagttgaagagcgtgaactgccggaactgactgcagaattcatcaaacgtttcggcgttgaagatggttccgtagaaggtctgcgcgctgaagtgcgtaaaaacatggagcgcgagctgaagagcgccatccgtaaccgcgttaagtctcaggcgatcgaaggtctggtaaaagctaacgacatcgacgtaccggctgcgctgatcgacagcgaaatcgacgttctgcgtcgccaggctgcacagcgtttcggtggcaacgaaaaacaagctctggaactgccgcgcgaactgttcgaagaacaggctaaacgtcgcgtagttgttggcctgctgctgggcgaagttatccgcaccaacgagctgaaagctgacgaagagcgcgtgaaaggcctgatcgaagagatggcttctgcgtacgaagatccgaaagaagttatcgagttctacagcaaaaacaaagaactgatggacaacatgcgcaatgttgctctggaagaacaggctgttgaagctgtactggcgaaagcgaaagtgactgaaaaagaaaccactttcaacgagctgatgaaccagcaggcgtaatttacgcagcataacgcgctaaattcgcacaaaggcccgtcaccgccaggtggtgggcttttttttgtcatgaattttgcatggaaccgtgcgaaaagcctctttcggtgttagcgtaacaacaaaagattgttatgcttgaaatatggtgatgccgtacccataacacagggactagctgataatccgtccataaggttacaatcggtacagcaggttttttcaattttatccaggagacggaaatgtcatacagcggcgaacgagataactttgcaccccatatggcgctggtgccgatggtcattgaacagacctcacgtggtgagcgctcttttgatatctattctcgtctacttaaggaacgcgtcatttttctgactggccaggttgaagaccacatggctaacctgattgtggcgcagatgctgttcctggaagcagaaaacccagaaaaagatatctatctgtacattaactccccaggcggggtgatcactgccgggatgtctatctatgacaccatgcagtttatcaagcctgatgtcagcaccatctgtatgggccaggcggcctcgatgggcgctttcttgctgaccgcaggggcaaaaggtaaacgtttttgcctgccgaattcgcgcgtgatgattcaccaaccgttgggcggctaccagggccaggcgaccgatatcgaaattcatgcccgtgaaattctgaaagttaaagggcgcatgaatgaacttatggcgcttcatacgggtcaatcattagaacagattgaacgtgataccgagcgcgatcgcttcctttccgcccctgaagcggtggaatacggtctggtcgattcgattctgacccatcgtaattgatgccagaggcgcaactgtgccgctatacttatccagggcggcacaacgctgtaagcggcttgcgcctgagaatggcatttgcgtcgtcgtgtgcggcacaaagaacaaagaagaggttttgacccatgacagataaacgcaaagatggctcaggcaaattgctgtattgctcttttgcggcaaaagccagcatgaagtgcgcaagctgattgccggtccatccgtgtatatctgcgacgaatgtgttgatttatgtaacgacatcattcgcgaagagattaaagaagttgcaccgcatcgtgaacgcagtgcgctaccgacgccgcatgaaattcgcaaccacctggacgattacgttatcggccaggaacaggcgaaaaaagtgctggcggtcgcggtatacaaccattacaaacgtctgcgcaacggcgataccagcaatggtgtcgagttgggcaaaagtaacattctgctgatcggtccgaccggttccggtaaaacgctgctggctgaaacgctggcgcgcctgctggacgtcccgttcaccatggccgacgcaaccacgctgaccgaagccggttatgtgggcgaagacgttgaaaacatcattcagaaactgttgcagaaatgcgactacgatgtccagaaagcacagcgtggtattgtctacatcgatgaaatcgacaagatttctcgtaagtcggacaacccgtctattacccgtgacgtttccggtgaaggcgtacagcaggcactgttgaaactgatcgaaggtactgttgctgccgttccaccgcagggcgggcgtaagcatccgcagcaggaatttttgcaggttgatacctccaagatcctgtttatttgtggcggtgcgtttgccggtctggataaagtgatttcccaccgtgtagaaaccggctccggcattggttttggcgcgacggtaaaagcgaagtccgacaaagcaagcgaaggcgagctgctggcgcaggttgaaccggaagatctgatcaagtttggtcttatccctgagttcattggtcgtctgccggttgtcgcaacgttgaatgaactgagcgaagaagctctgattcagatcctcaaagagccgaaaaacgccctgaccaagcagtatcaggcgctgtttaatctggaaggcgtggatctggaattccgtgacgaggcgctggatgctatcgctaagaaagcgatggcgcgtaaaaccggtgcccgtggcctgcgttccatcgtagaagccgcactgctcgataccatgtacgatctgccgtccatggaagacgtcgaaaaagtggttatcgacgagtcggtaattgatggtcaaagcaaaccgttgctgatttatggtaagccggaagcgcaacaggcatctggtgaataattaaccattcccatacaattagttaaccaaaaaggggggattttatctcccctttaatttttcctctattctcggcgttgaatgtgggggaaacatccccatatactgacgtacatgttaatagatggcgtgaagcacagtcgtgtcatctgattacctggcggaaattaaactaagagagagctctatgaatcctgagcgttctgaacgcattgaaatccccgtattgccgctgcgcgatgtggtggtttatccgcacatggtcatccccttatttgtcgggcgggaaaaatctatccgttgtctggaagcggcgatggaccatgataaaaaaattatgctggtcgcgcagaaagaagcttcaacggatgagccgggtgtaaacgatcttttcaccgtcgggaccgtggcctctatattgcagatgctgaaactgcctgacggcaccgtcaaagtgctggtcgaggggttacagcgcgcgcgtatttctgcgctctctgacaatggcgaacacttttctgcgaaggcggagtatctggagtcgccgaccattgatgagcgggaacaggaagtgctggtgcgtactgcaatcagccagttcgaaggctacatcaagctgaacaaaaaaatcccaccagaagtgctgacgtcgctgaatagcatcgacgatccggcgcgtctggcggataccattgctgcacatatgccgctgaaactggctgacaaacagtccgttctggagatgtccgacgttaacgaacgtctggaatatctgatggcaatgatggaatcggaaatcgatctgctgcaggttgagaaacgcattcgcaaccgcgttaaaaagcagatggagaaatcccagcgtgagtactatctgaacgagcaaatgaaagctattcagaaagaactcggtgaaatggacgacgcgccggacgaaaacgaagccctgaagcgcaaaatcgacgcggcgaagatgccgaaagaggcaaaagagaaagcggaagcagagttgcagaagctgaaaatgatgtctccgatgtcggcagaagcgaccgtagtgcgtggttatatcgactggatggtacaggtaccgtggaatgcgcgcagcaaggtcaaaaaagacctgcgtcaggcgcaggaaatccttgataccgaccattatggtctggagcgcgtgaaagatcgcatccttgagtaccttgcggttcaaagccgtgtcaacaaaatcaagggaccgatcctctgcctggtagggccgccgggggtaggtaaaacctctcttggtcagtccattgccaaagccaccgggcgtaaatatgtccgtatggcgctgggcggcgtgcgtgatgaagcggaaatccgtggtcaccgccgtacttacatcggttctatgccgggtaaactgatccagaaaatggcgaaagtgggcgtgaaaaacccgctgttcctgcttgatgagatcgacaaaatgtcttctgacatgcgaggcgatccggcctctgcactgcttgaagtgctggatccagagcagaacgtagcgttcagcgaccactacctggaagtggattacgatctcagcgacgtgatgtttgtcgcgacgtcgaactccatgaacattccggcaccgctgctggatcgtatggaagtgattcgcctctccggttataccgaagatgaaaaactgaacatcgccaaacgtcacctgctgccgaagcagattgaacgtaatgcactgaaaaaaggtgagctgaccgtcgacgatagcgccattatcggcattattcgttactacacccgtgaggcgggcgtgcgtggtctggagcgtgaaatctccaaactgtgccgcaaagcggttaagcagttactgctcgataagtcattaaaacatatcgaaattaacggcgataacctgcatgactacctcggtgttcagcgtttcgactatggtcgcgctgataacgaaaaccgtgtcggtcaggtaaccggtctggcgtggacggaagtgggcggtgacttgctgaccattgaaaccgcatgtgttccgggtaaaggcaaactgacctataccggttcgctcggcgaagtgatgcaggagtctattcaggcggcgttaacggtggttcgtgcgcgtgcggaaaaactggggatcaaccctgatttttacgaaaaacgtgacatccacgtccacgttccggaaggtgcgacgccgaaagatggtccgagtgccggtattgctatgtgcaccgcgctggtttcttgcctgaccggtaacccggttcgtgccgatgtggcaatgaccggtgagatcactctgcgtggtcaggtactgccgatcggtggtttgaaagaaaaactcctggcagcgcatcgcggcgggattaaaacagtgctaattccgttcgaaaataaacgcgatctggaagagattcctgacaacgtaattgccgatctggacattcatcctgtgaagcgcattgaggaagttctgactctggcgctacaaaatgaaccgtctggtatgcaggttgtgactgcaaaatagtgacctcgcgcaaaatgcactaataaaaacagggctggcaggctaattcgggcttgccagcctttttttgtctcgctaagttagatggcggatcgggcttgcccttattaaggggtgttgtaaggggatggctggcctgatataactgctgcgcgttcgtaccttgaaggattcaagtgcgatataaattataaagaggaagagaagagtgaataaatctcaattgatcgacaagattgctgcaggggctgatatctctaaagctgcggctggccgtgcgttagatgctattattgcttccgtaactgaatctctgaaagaaggggatgatgtagcactggtaggttttggtacttttgccgttaaagagcgtgctgcccgtactggccgcaacccgcagaccggtaaagagatcaccatcgctgctgctaaagtaccgagcttccgtgcaggtaaagcactgaaagacgcggtaaactaagcgttgtccccggtggggatgtgacgaagttcaagggcgcatctactgatgtgccttttttatttgtattcggtgactttctgcgtcttgtgggctgacaattgcccccgtttcttgtcacaataggcctttgcgcgcatcgatacgttgcgtgaggtacacagtcatctacagcggagtgttgttacaccatgatggacagcttacgcacggctgcaaacagtctcgtgctcaagattattttcggtatcattatcgtgtcgttcatattgaccggcgtgagtggttacctgattggcggaggcaataactacgccgcaaaagtgaatgaccaggaaatcagccgtgggcagttcgagaacgcctttaacagcgagcgtaatcgcatgcagcaacagctgggcgatcaatactccgagctggcagcgaatgaaggctatatgaaaaccctgcgtcaacaggtgctgaatcgtctgatcgacgaggcgctgttggatcagtacgctcgtgagctgaaactgggtatcagtgatgagcaggttaaacaggcgattttcgcgaccccagccttccaggttgacggcaaatttgataacagccgctataacggtatcctcaaccagatggggatgaccgccgatcagtacgcccaggcgctgcgtaaccagctcactacccaacagctgattaacggtgttgccggtaccgattttatgctgaaaggtgaaaccgacgagctggcggcactggtcgcgcaacaacgcgtggtgcgtgaggcgactatcgatgttaacgcgctggcggcgaagcagcctgtgaccgaacaggagattgccagctactacgaacaaaacaaaaacaatttcatgacgccggaacaattccgcgtgagttacatcaagctggatgccgcaacgatgcagcaaccggttagcgatgcggatatccagagctactacgatcagcatcaggatcaattcacccagccgcagcgtacccgctacagcatcatccagaccaaaactgaagatgaagcgaaagcggtacttgatgagctgaataaaggcggtgattttgctgcattagccaaagaaaaatctgccgatattatctctgcccgtaacggcggcgatatgggttggttagaagatgccactatccccgacgaactgaaaaatgctggtctgaaagaaaaagggcaactgtctggtgtcatcaaatcttcggtcggtttcctgattgtacgtctggacgacattcagccagcgaaagtgaaatcgttagacgaagtacgtgacgacattgcggcgaaagtgaaacacgaaaaagccctcgatgcgtactatgcgctgcagcagaaagtgagcgatgcggcaagcaacgacaccgagtctctggccggtgcagagcaagctgctggcgttaaagccactcagacgggttggttcagcaaagataacctgccggaagagttgaacttcaagccggttgccgacgctatctttaacggcggtctggtaggtgaaaacggcgcgccgggcatcaactctgacatcatcaccgtagacggcgaccgcgcattcgtgctgcgcatcagcgagcacaaaccggaagcggtgaaaccgttggcagatgttcaggaacaagttaaggcattggttcagcacaacaaagctcaacaacaggcgaaagtggatgctgagaaactgctggttgatttgaaagccggcaaaggtgcggaagctatgcaggctgccggtctgaaatttggcgagccgaaaaccttaagccgttccggtcgtgacccgattagccaggcggcgtttgcactgccactgccagcgaaagacaaaccgagctacggtatggcgaccgatatgcaaggtaatgtggttctgctggcgctggatgaagtgaaacaaggttcaatgccggaagatcagaaaaaagcgatggtgcagggtatcacccagaacaacgcacaaatcgtctttgaagctctgatgagtaacctgcgtaaagaggcgaaaatcaaaattggcgatgcgctggaacagcaataatcctgaagccgcctcgcaaaaaaatgcgttgcagctgtaacaagaaaaggtcgctttcgcggccttttccatttctgaacattgccatttgtttactgttttcactgccgttaaggtgattccactgttaacaaacaaggagaaaacagtatgaaacacggaattaaagcactgctcattaccctgtccctggcctgtgccggaatgtctcatagcgcgctggcggcagcttctgtggcgaaaccgacaacggtagaaaccaaagcggaagctcctgcagcacaaagtaaagcagcagtaccggcgaaagccagtgacgaagaaggcacccgggtcagcattaataatgccagcgcggaagagctagcccgcgcgatgaatggcgttggcctgaagaaagcgcaggcgattgtcagttatcgcgaagagtacggtccgtttaaaacggtggaggatctaaagcaggtgccggggatgggcaattcgctggtggaacgtaatctggcggtattaaccctgtaattaatttgcatagtggcaattttttgccagactgaagaggtcataccagttatgacctctgtacttataacaacaacgtaaggttattgcgctatgcaaacacaaatcaaagttcgtggatatcatctcgacgtttaccagcacgtcaacaacgcccgctaccttgaatttctcgaagaagcccgctgggatgggttggaaaatagcgacagttttcagtggatgacggcccataacatcgccttcgtcgtggtcaatatcaatattaactatcgtcgcccagcggtattaagtgacctgttaactattaccagtcagttgcagcaattaaacggtaaaagcggcatcttaagccaggtcattacactggagccggaagggcaggtggtagcggatgcgcttattacgtttgtttgtattgatcttaaaacgcagaaagcattagctctggaaggggaattgcgcgaaaagctggagcagatggttaagtaaacgttttgtggtgccggatgctcaagccgcatccggcgacacccggaataattacctcaacccggttttctgcttcatcgctgccatcaccgtcggtttatcggccagataatgattcaaaccgttggcgcgtaaattacatgccgcacaatgaccgcaaccgtcgcctttaatgccgttatagcaggtcaacgtttcgttacggactaaatccagtttgccgtaataatctgccagcgcccaggtttccgctttatcaatccacatcagcggcgtttcaaaacgaatatctttcgccatgcccaaactgacggcatggtttagtgctttcacaaactcatcgcggcaatccgggtagccggagaaatccgtttcacagacgccggtaattacggcttctgcttttacctgatacgcatatattgccgccagcgtcaggaacaaaatattacgccctgggacaaacgtattcgggatgccatcggcttcaggttcataatcaggcaccggaatgctgtcacgtgtcaggctgctgaccgccagctcgttgagcagcgttacatcaagaaccttacgcgcgcgtgctcccagtttcagcgccagttcgcgtgccacgtcgatttctgcgcgatgtcgctgaccgtaatcgaacgtcacgcaatggacttcatcatattgttgtaatgcctgcaccagacaggtggtggaatcctggcctccactgaacacaacgacagcacgtttcatagataatcctgcttgaacaataaaagcgttatggtaacgcctgcgattaacccggaccagctattcattgcgacggcgcgggaagccaggcttcggtaaattcaaaccagccgcgcggtgtcagtcgcacaccgttcacgccgggaggggcactaatgcgatagtgatagttgaacagcggcgtcagcgtcgcgtctgccattaactggctaaaaaccgctttcagggcattaaatcggttttcctcatcaggcattacttgcaccgcgtccagcgtcgattgcagatgtgcatatgctggagcgtcgaaaacatgtggccatagtggatcgcaacgtagccattgctccagagtatattccggtgcttcgccaattaatctgtcgcccatcatgaggtctgcgtgtgccagtagggtcgtgtcgtcccagttttttgcgttatgaaaaataattgtgagttcacagccttccgctgccagtgtcgcctgtaggcgttctgccatggtatgaagttctatcggtaggtgataaaccagcgtcaaggttttcggtagtttgacttcatccggtacttgccagtacggaatagtccagcctggcagtaatgcatgactggcggtgatcaggttttctccgacttctaacgtttgtaataaaccggattgatgaataatggagatcacttttcgcgcctgccagagggagagtcggggacttttgcgcaacgttaaatagcaaaaacctaaactgatgccactactgacctggctgacccgttgcagctcctccggtttgccgatggtgatttgcacgggatgccgacaactgtttcccaaatctttttcgaaaagcggcggagttatccagtactcaaccgctttaagcagcggatgacgcaaatggtaataatcatggctctccaggcgcaccagctccgctgtgaattgtgttaagcgaaaaggaccagtgccgatcagtgggaattgcggatgcgccagatggctgcaatagctcgccagccggtgcgcaagccagtaatcggggcgatgtaaaaagaaggtcagacactgcggatgggtgacttcaatacgcttcacgctaataaataattgatccagtgctggcagttgtaacagcatcaataatcgctggtgtaagtgtgaggcttttactgcatcgccgttatgccagtgtagggttgaacgaagataaaagtcccagcgtaacccgtcagtagaggtttcccagtgatgcgctaaatcgccaatcgggcgctgagtattattatcgaagcgggtcaggccggaaaatatctgcccggcgagatgctgctcggcacggccgggcaaaaagcctggttgtagcggttcgagcgggcgatagtagggaatacgcaacgtgggtgtatcgttttgccattgtccgcccataaacggctgtaacagagtgcgcagctcacctggggccagttgcgccagctccagcacatcttgctgctttccggtttccagtgcctgttccatcatcgcattgcgtagcgattccggcgtgaccagaaagcgtaattgtccgcgctttccgcgtcctgactgcgcctgccactccagccatcccgcctcctgtgcctgacgcaacagcgtacgaacatggcgttcgctgcaaaaacagcgttcggccagttcgctgacggtgacggtttgcggctttccggctgaaggttgccacagacgttgatactggttaagacggttgagcaatcgcatataaacccggaacaatattatttaactattcactattacttccgtatatatcaggtgatactcaatcaccattaaccgtgtcacagagtggagaaagaaatggctcgtctggcagcatttgatatggatggcactttattgatgcctgaccatcatttaggtgagaaaaccctctctactttggcgcgactgcgtgaacgcgacattaccctcacttttgccacggggcgtcatgcgctggagatgcagcatattctcggggcgctatcgctggatgcatatttgattaccggcaacggaacgcgcgtgcattctctggaaggtgaacttttacatcgtgatgatttacctgcggatgtcgcggagctggtgctgtatcagcaatgggatacccgagccagcatgcatatcttcaatgacgacggttggtttaccgggaaagagatccctgcgttgttgcaggcatttgtctatagcggttttcgttatcagataatcgatgtcaaaaaaatgccactcggcagagtcaccaagatctgcttctgtggcggtcacgacgatcttacacgcttgcagatccagctatacgaagcattaggcgagcgtgcacatttgtgtttttccgccacggattgcctcgaagtgctgccggtgggctgcaataaaggcgctgcattgacggtgctgacccaacatttaggtttatcgttgcgcgattgcatggcctttggtgatgcgatgaacgatcgcgaaatgttaggcagcgtcggtagcgggtttattatgggcaatgcgatgccgcaactgcgcgcggagctcccgcatttaccggtgattggacattgccgaaatcaggctgtctctcactatttgacgcactggctggactatccacatctaccttattcccccgaataacgagatcccttccagcaccgggcaattgcccggttttttttgcgttgaatttgtcattttgtgccgtggtgtttaaaccgcacagaataaattgtcgtgatttcacctttaaaatagaattaaaagagaaaaaaattctctgtggaagggctatgttagataaaattgaccgtaagctgctggccttactgcagcaggattgcaccctctctttgcaggcactggctgaagccgttaatctgacaaccaccccttgctggaagcgcctgaaacggctggaggacgacggtatccttatcggcaaagtcgccctgctggatccggaaaaaataggcctcggcctgaccgcctttgtgctgataaaaacgcaacatcacagcagcgaatggtattgccgctttgtcacggtggttaccgaaatgccagaagtgctggggttctggcgcatggctggtgaatacgattatctgatgcgcgtccaggttgccgacatgaaacgctacgacgagttttataagcgtctggtaaacagcgtgccggggctgtcggacgtcacttccagcttcgcgatggaacagattaaatacaccacttctttacccatcgaataaatatccagaatcaggtcaggacacaacgcgtgcgattatttgctcaattaagctggtatttccgtcgggaatggcgtcgctatctcggggctgtcgccttgcttgtcattatcgcgatgctgcaactggttccgccaaaagtggttggtattgttgtcgatggcgtgacagaacaacactttactaccgggcagatcctgatgtggatcgccaccatggtgctgattgccgttgtggtttatctcctgcgttacgtctggcgggtattgctgtttggtgcgtcttatcaactggctgttgaactgcgtgaagattattaccgtcagctaagccggcagcatcctgagttttacctgcgtcatcgcacgggtgatctcatggctcgtgcgaccaatgacgtcgatcgcgtcgtgtttgccgccggagaaggggtgctgacgctggtggattcactggtgatgggctgcgctgtgttgattatgatgtctacgcaaattagctggcagttgaccttatttgccctgttgccgatgccagtgatggcgatcatgatcaagcgcaacggcgatgccttgcatgaacgctttaagctggcacaggcggcgttttctagtcttaatgaccgcacccaggaaagcctcaccagtatccgcatgatcaaagcctttggtctggaagatcgccagtcggcgttatttgccgcggatgccgaagataccggcaaaaaaaacatgcgggtggcgcgtattgatgctcgtttcgacccaaccatctatatcgcgattggtatggcgaacttgctggcgattggcggcggtagttggatggtggcgcagggcagtttaacgctgggccagctcaccagttttatgatgtatttaggtctgatgatttggccaatgctggcgctggcatggatgtttaacattgtggaacgtggtagtgctgcatacagccgtattcgcgcgatgctggcggaagcgccggtggtgaacgatggtagcgaacccgtgccggaagggcgtggcgaactggatgtaaatattcaccagttcacgtatccgcagactgaccatcctgcgctggaaaacgtcaatttcgccctgaaacccggtcagatgctgggtatctgcgggccgactggttccggcaaaagtaccctgttgtcgctcattcagcgtcatttcgacgtcagcgagggggatattcgctttcatgatattcctctgacgaagttacaactcgatagctggcgtagccgcctggcggtggtcagccagacgccattccttttttctgacaccgtggcgaataacatcgcgctgggttgcccgaatgccacccagcaagagattgaacacgtagcgcggttagccagcgtacatgacgatattttgcgtctgccgcaaggttacgatacagaagtgggcgagcgcggcgtgatgctttccggtgggcaaaaacagcgtatctccattgctcgagcgttattagtcaacgcggaaatcctcatccttgatgatgcgctttcggcggtggacggacgcacagagcaccagatcctgcataacctgcgtcagtggggacagggaagaacggtaatcatcagtgcccatcgcctttcggcactgacggaagccagtgaaattattgtgatgcagcacggacatatcgcccagcgtggcaatcatgatgagctggcgcaacaaagcggctggtatcgcgatatgtatcgctatcaacaactggaggcggcgctcgacgacgttccggaaattcgcgaggaggccgtcgatgcgtagttttagccaactgtggccgactctcaagcgtctgttagcgtacggttcgccgtggcggaaaccgctggggattgcggtcctgatgatgtgggttgcggcagcggcagaagtcagtgggccgctgcttatcagctattttatcgacaatatggtagcgaaaaataacctgccgttgaaaatggttgcagggctggcggcggcgtatgttgggctacaactgtttgccgccgggctacattacgcgcagtcgctgctgtttaatcgggcggcagtaggcgtagtgcaacagttgcgtaccgacgtgatggatgctgcgttacgccagccattaagcgagtttgatacccaacccgtcgggcaggtgatttcccgcgtcactaatgacactgaagtgatccgcgatctctacgttaccgtagtggcaactgtcctgcgtagcgccgcactggtgggcgcgatgctggtggcaatgttcagcctcgactggcgaatggcgctggtggcgataatgattttcccggtagtgctggtggtaatggtgatatatcaacgttacagcacgccgattgtccgtcgtgtgcgcgcctatctggcggatatcaacgacggctttaacgaaatcatcaatggcatgagcgttatccagcagttccgtcagcaggcgcgatttggcgaacgtatgggtgaggccagtcgttcacactatatggcgaggatgcaaaccctgcgcctcgacggttttctgctgcgtccgctgctgagtctgttttcatcgctcattctttgtggcttgttgatgctgtttggcttctccgccagcggcaccattgaagtgggcgtgttatatgcgtttatcagctatcttgggcgacttaacgaacccttaatcgaactgaccacgcagcaggcgatgctgcaacaggctgttgttgctggtgagcgcgtgtttgaactgatggacggaccgcgccagcaatatggcaatgatgatcgcccgttacagagcggcaccatcgaagtcgataacgtgtcatttgcttatcgcgatgacaatctggtgctaaagaacattaatctctctgtgccttcgcgtaactttgtggcgctggtcgggcataccggcagtggcaaaagcaccctcgccagtttattgatgggctattacccgctaacggaaggtgagattcgccttgatggtcgtccattaagttcgctaagtcacagcgcgctgcgccagggcgtggcaatggtgcagcaagatccggtggtgctggcggataccttcctcgccaacgtgacgctgggacgtgatatctccgaagaacgcgtctggcaggcgctggaaaccgtgcaactggcggagctggcgcgcagcatgagtgatggtatttatacgccgctgggcgagcagggaaataatctctcagtcgggcaaaagcaactgctggcactggcgcgcgtgctggtggagacgccgcaaatcctgatccttgatgaggcaaccgccagcattgactccggtactgaacaggcgattcaacatgctctggcggcggtgcgtgaacataccacgctggtggtgattgctcaccgcttatcaactattgttgatgccgacaccattctggtgcttcatcgtggacaagccgtggagcagggcactcaccagcaactgctggcggcccagggacgctactggcagatgtatcaactgcaacttgcgggcgaagagctggcagccagcgtgcgtgaagaagaatcattgagcgcctgaatagcgcaatatttcatcgttggtgcaaaaatgtaacgcactgtgcactgtcatagtgcgttttcattttcaatcttcttaacttcctgctctctttctcgtttttcatttctggcacaccgcttgcaataccttcttcgtgtagcagaaccattaccgaattctgaccggaggggatctatgaagctggtgaccgtgataatcaaaccattcaagctggaagacgttcgtgaagcgttatcttccattggtattcagggcctgaccgtcaccgaagtgaaaggtttcgggcgtcagaaagggcatgccgagctgtaccggggggcggaatacagcgtcaacttcctgccaaaagtaaaaattgatgtggcgattgctgatgaccaactcgatgaagtgatcgatatcgtcagtaaggcggcttacaccggaaaaattggcgacggcaaaatcttcgtcgctgaattgcaacgcgtcattcgtattcgtaccggcgaagccgacgaagcggcgctgtaatctctggcacacagcaacaggaacgaaaaatgaagatagcgacgataaaaactgggcttgcttcactggcgatgctgccgggactggtaatggctgcacctgcggtggccgataaagccgacaatgcgtttatgatgatttgtactgcgctggtgctgtttatgactattccggggattgccctgttttacggtgggttgattcgcggcaaaaacgtgctgtcgatgctgacgcaggtgacggtgacgtttgcactggtctgtattctctgggtggtttacggttactcgctggcgtttggtgagggcaacaacttcttcggcaacattaactggctgatgctgaaaaacatcgaactgacggcggtgatgggcagcatttatcagtatatccacgtagcgtttcagggatcgtttgcctgcattaccgtaggcttgatagttggggcgctggcggaacgaatccgcttctcagctgtgttgattttcgtggtggtatggctgacgctctcttacattcctattgcgcatatggtctggggcggtggtttgctggcttctcacggtgcgctggatttcgcgggtggcacagtggtgcacattaacgccgcaatcgccggtctggtgggcgcgtatctgataggaaaacgcgtgggcttcggtaaagaggcgtttaaaccgcacaacctgccgatggtcttcaccggtactgccattctctatattggttggtttggctttaacgccgggtcagcgggcacggcgaatgaaatcgcggcactggcatttgtgaatactgtggtcgcaacggcggcggcaattcttggctggatcttcggtgaatgggcgctgcgtggtaagccttctctgctgggagcgtgttctggcgcgattgccggtctggtcggcgtgacgccagcgtgtggctacattggggttggcggcgcgttgattatcggcgtggtagctggtctggcgggcttgtggggcgttactatgctcaaacgcttgctgcgggtggatgatccctgcgatgtcttcggtgtgcacggcgtttgtggcattgtcggctgtatcatgactgggatttttgccgccagttcgctgggtggcgtgggcttcgctgaaggcgtgacgatgggccatcagttgctggtacagctggaaagcatcgccattacgatcgtctggtccggtgtggtggcatttattggctacaaactggcggatctgacggttggtctgcgtgtaccggaagagcaggagcgagaagggctggatgtcaacagtcacggcgagaatgcctataacgcgtaacaagcactgcaaaaaacagccggacggttttcacctccggctatttttttaattgtgattacgcatcaccccttcctgaacggtcgaggcaaccagtacgccgtcctgggtataaaactcaccgcgcacaaagccacgtgcgctggacgccgaggtgctctccacgctatacagcagccattcattcaaattaaacgggcgatggaaccacatggaatggtcaatggtggcaatctgaatccccggttcgagaaaaccgatgccgtgcggctgtagagctaccggcaggaagttaagatcagaagcgtaaccgagcagatactgatgaacgcgcaggtcatccggcacgctaccatttgcgcggatccacacctgacgatgtggttctgcgacgtgacctttcagtgggttatgaaactccaccggacggacttccagcggacgatcgcagatgaatttatctttaagcactggcggcagcaggtgcgccagcgattgggcgatttgcgtttccgaaggcaggccatcaggcgctggcgcggacggcattgttttttgatgttcgaaacccgcttctggtgcctggaaagaggccgtcatataaaaaatcggtttgccgttttgaatagcagcaacccggcgggcgctgaagctgttaccgtcacgcagcgtttcgacatcataaataatcggtttcttactatcgcctgggcgaagaaagtagctgtgaaacgaatgtaccagccgctcttccgggacggtctcttttgcagcatacaaggcctgacccacgacctggccgccaaacacctggcgtaaacctaaatcttcactctggccgcgaaagagtccttcctcaattttttccagatttaacaatgtcagtaaatttttgagcgcctgactcatataactctccagtaacaaagctgccgcagcaagccaaagtgagttgagtataacgcaaatttgccactggtccgatgggtgcaataatctgaattacgggctaattacaggcagaaatgcgtgatgtgtgccacacttattgacgttactattttgttaaccactcttccggcgaggaaagttagcccgctggtgcattgataataaggagaaatgaatgaaactcgtgcacatggccagtggtttagcggttgcgattgcgttggcggcttgcgcagataaaagcgcggatattcagacgccagccccggctgcaaatacgtctatttcagcaacacaacaacctgctatccagcaaccgaatgtctccggtaccgtctggatccggcagaaagtcgcactgccgcctgatgctgtgctgaccgtgacactttctgacgcgtcgttagccgatgcaccgtcaaaagtgctggcgcagaaagcggtgcgtaccgaaggtaaacagtcaccattcagctttgttctgccatttaatccggcagatgttcagccgaacgcgcgtattctgttgagtgcggcgattaccgtgaatgacaaactggtatttattaccgataccgttcagccggtgatcaacaagggcggaactaaagccgacctgacattggtgccggtgcagcaaaccgccgtgccggttcaggccagcggtggtgcaacgactaccgtaccttcgacttcaccaactcaggtgaatccgtcttcggcagttccagctcctacgcaatattaagcgacgttaaccctctccgcccggagagggttagtagttccagcgataacgctgcaagtcgatttgcccgcttcccgataccatcacaccttctgccagtaatgcctgtcgctgacgctgtaaatccggtccggttagcgaaattgtgccgtggcgattaaccacccggtgccagggtaaggtgctgccttcagggagacgctttaacacaccgcccacctggcgcgcggcgcggggcgatcccgccagtttcgccacatcaccgtaagtggtgacatagccttcgggaatagcggcgacgatttgccagacgcgttggggaaatgaatcttctttttccatcttttcttcctgaggtaatttttcagcataatctggaaaaacgcccgagtgaagtcgcattgcgcaagaaaccagcatctggcacgcgatgggttgcaattagccggggcagcagtgataatgcgcctgcgcgttggttctcaacgctctcaatgggggctctgttggttctcccgcaacgctactctgtttaccaggtcaggtccggaaggaagcagccaaggcagatgacgcgtgtgccgggatgtagctggcagggcccccacccatttctgcctcccaccgtttcgtcaaaaaaaaccaacatggctaaactttaaccacaactgacgtcgcaagaattgtctggctgcgcagtacgcttcggaggtatgtctgatgaagtatgttgatggttttgtggttgccgttcctgccgataaaaaggatgcctatcgggaaatggccgctaaggctgcgccattgtttaaagagtttggcgcgcttcgtattgtcgaatgctgggccagcgatgtaccggatggcaaagtgaccgattttcgtatggcggtgaaagcggaagagaatgaagaggttgtctttagctggattgaatacccttcaaaagaggtccgcgacgctgctaatcaaaagatgatgtcggacccacggatgaaagagttcggcgagtccatgccgtttgacggcaagcgaatgatctatggcggattcgagtcaatcatcgacgaataggtagcgtgacgggctgtgcggcgtgccgtcagcccaaaaattcacaaatgttgctcggcccagcgtaagaaatcttctttcggtaatgccttgctgtagagccagccctgaccgtagtgcacgccatgctggcgtagccactcttcttgtttactggtttcgattccctccgctaccattttcagtttcagtgtttttgccatttcgatgatatgcggcgtgacatttttatattccagcgcatcaacgaaagatttatcgatcttcagaatgtcgacatccagatcctgtaaataacttaaacttgaatatcccgtaccaaaatcatcaagataaatttcatggcccgcctcccggtagcgagaaattatcggggcgctggttttcggatcggcaaactcgcgttcagtgagttcaagcgcgatctgtctgggattaacctgatagtgattgatcatttcacgcagcaattgcgggattttttccgaggtgagcacggtggattcaagattgatcgaaatatgctgctgtggatgctgacgcagccagtcgcccatatcttcaaagacgcttcttataatcagtagcgtcaatggctcagaaaggcccgtttgctgtgccagcggaataaaactatctggtgacaaccaactaccgtctgtctgcggccagcgcgccagtgcctcagcaccgacaattttgccattggctaaggagacaatcggctgatagtgcacgcaaatatcacgattttcgatagcatcctgcagccgatgatgcggtgactggatacggcgcaaaatacgcagcacaaacatcgctgccagcaggccaatcaccaacccgagcggtaaccaaataaagacttgccgatgccagcctttctgcaacattttcgttgaagcccaggtgatgatcgaaatattcatctccgggaagggcaggatatcgtaaatgattccattattttcgatatgctcaccgggtgttttttgtagcctggtaataattccctgagcaatttcatcgctgctggttatgacaacgttatgggcattgccaataatggcggcatcaatttgccatgagctatagggaatgacatcaataaaggaagcggggtcgatcatgacgacataatgtgccgttcccatggcgaccatgtaacggataatgcctaaatcgttatgcgatgttaaccagacacgataaccatctttcgaaattttacctggctcggggaaggtatcgggcggactttcatgctccagagacgaacactggggaacgttgttatcgatataaaccacttcctgaatatagcgataactgtaagatacccgacgcatttccatgagatgggcttcgctacaggcagcgccttgccatctttccagctcttgcagcgcatctttcccttgtgtcgccaccttattggcccgaatagcgacgcgggaggaataggtatccagctcttcaataaacgatgtttctacctgctgatgggccagccagatgcttaagccgacaggcagcaatactgaaagaatcagtactcccgaaataaggccgaccagatgtcgtgttctcaccagcatatccttattaacacagtgtagggaaagtatatctgattgtggaaaaaggctggcaggagataaggaggtagagctggtatttcatgaagtgatgggtggaaacgatcattgtcatttgaccaggcgcagagctttacgcctggtatgtaaccctaacttaagatgttgattcggcgcgagcgagggtaaaaatatcgtaaaaagacagttcacctttacggacgatcattttttgcagttgttccttatgaacatccgcgacacgcggagagttcaagatggcttcaaccagcgcggcaggtacaaagcgcgtgttgtaccattcgccgttatagcaaacgcggaaatccagcacgtcgatatcttcatagcggtagcgtgggtagacatcgaaaaagaagaaaccattaagcaggataaataatacaaccagtagccagacagagcctgacagcgtttcggactgcaacatcaccgccagggtggcaaaaaaagcaacgtacataccgataaacagccccggatgtttacggataaaactgatactaaagcggggtttgttgtcgcgtttttcgcgggtattcagagactcaatcgtttcggtcagcaggcgttgtatttcggtcatcgtttgccttcgtggtatctgcaactttccagggaacaccctattttaacgtgggaatagtagaggggaagtaacagatttaccacaattttgcataacagttgcgaaaaaccgattacaattttttaattattctggctggattaccgcccacgacaacgttgtccgggacatcttttgtgacaactgcacctgaggctaccacgacgttatcaccaatggtcacaccagggttaatgaccgcgcgtccgccaatccagacgttattaccgatggtgacgggtttccccagttcagcaccgctattacgtgctacagggtcgatgggatgtgttgccgtgtagatatgaacgcctggtgccaacatacagttatcaccgatgcgaatagggcagacatcaagcatcacgcaatcgaagttggcgaaaaaattattaccgagaaaaatgttatagccatagtcacagcgaaacgttggctcaatataagcctctgtcacctgaccgaatagatcagcgagaatttgctggcgtaatgtgtgctcttccgccagggaatgattgtatcggtgaataagctgacgagcgcgcaggcgatcgcgagataacgtctcatctgccgagcgatacaactcaccagcaatcatcttttctttttctgtgctcattactgacctccggttgctgaaaatgcggcaacacagtaagacgaaaagtcagtgaagagaacgttcccattacatctgtgtgataaagatcacatagggtatgtcttcatggtgaaaagtataaaattcttaataaacagccggttatagctccgaaagcgaattatttattagcgaataaatttccatactgaggaagggatcttgtcgtatagtttattcatggtcaattcggcgaggcggtgatctgcggctgagtaaaataccgccagttcattatctgataattcgtatttatttttctcgataacacgctccagcgtgtcaattgtctggcaacgacgtaaacgcattaaataatcggttttcgttaaaggtttttcggacatacttctacccatggttgtaataattctaacaagataaactcgcaggattctctttcgtcgcattgacaaaacaacggaatagtcgattacctgacttccgccatttctgaagatcctgcatattaataccataactactgaacaacataaaggtgtcatccagatattcgtcgatctgctcaatgagcttattgtcttcattatacttaattttgtaattaagtgcgaaggtcgcaatatgctcaatcagttcattcaactggaggttgatcgccgaggttgggtcgttaacccagccatgattgctttcttcaaggtttgcaaggcagtcatgatacagggtttcacagagaaacttaagctgtgcgatatcatgtcttttgggtgagtattcatccataacgcgtccccttcttagcggttgaactaacggacacctttcgggatggaaaaaacttactgacctggacttgccctctcgtttgttagcttaactataagccactctttgcaggttttcatcgcattattacgaaaaattacaattaggaaggaatcgggacaggactcactttttcatactagcactaacccgcagcaggtaaaagcagtttgctcgaactgttcataacatttcaggattatcgccagatgaaattggtgacactaataccaggattgctctgaatatgacgtaataaccgaggaatgaataaagaattaccgcaaataattaagaatagcctctaaatgattatggattattaaatctattagcgctacttaatataaattaactaacaatcagtattttttatgaattttatccgtggttaatactggttttcgtatgagatcctgagttggtggttcaattactccttaatgttcgtaggttatgcataaaaaaggccgcttgcgcggccttagtgattacacgttgtatcaatgatgatcgacagtatggctgtgctcgatatcttcattcttgcggctaaagcggcggcgaaccaccacaaagaataccggaacgaagaagattgccagtaccgttgcggtcaccatcccgcccattacaccggtacctactgcgttctgcgcgccggaaccagcaccagtactgataaccagcggcataacgccgaggataaacgccagcgaggtcatcaggatcggacgtaaacgcatccgcactgcatcaagcgtcgcttcaatcagacctttaccttctttatccatcaagtctttggcgaattcgacgataagtatcgcgttcttcgccgacaacccaatggttgtgagcaggcctacctggaagtaaacgtcattggtcaggccacggaaggtggcagccagcaacgcaccgataacccccagcggaacgaccagcataacggagaacggaatcgaccagctctcgtacagcgccgccagacacaggaatacgacaatcaacgaaatcgcgtacagtgaaggtgcctggttgccggagaggcgttcctgataggacatccccgtccagtcatagccaacaccggtaggcagtttgctcgccagttgttccatcagctccattgcttcaccggtacttttacccggtgccgcctggcctaagatttccatagatggcaggccgttgtaacgttccagacgcggcgaaccgtactcccaacgagaagaggagaacgccgagaacggcaccatctgaccatcagcagcacgaacataccagtcgccgatatcatccggcagcatacggtatttcgcttctgacatgacgtaaactttcttcacacgaccgcggtcgataaagtcgttcacatagctaccaccccatgcagcgcccagagtggtgttaatgtcgttgatagaaacacccagcgcctgcgctttttcctggtcgatatcaatcttaaactgcggggtatcttccagaccgtttggacgtacgctggtcaacatatcagggtgcttcgctgcttctgcaagcagctggttacgcgcctgagtcagtttttcgtgaccaaggccagcctggtcaatcagctcaaagtcaaagccggttgcagtacccagttccacgattgcgggcaggttaaaggcgaaaaccatcgcatctttgatttgcgagaaagcgcgtgttgcacgcatagtaatcgcttcaactttgttttcttcgcccggacgatcggcccagtccttcaaggaaacgaacgcaataccggtattctgaccacgtcccgcaaagccgaagccgttaacggcgaacaccgactcaacgttgttcttttctttggtcagatagtaatgcgttacctcattgagcactttctgcgtacgttcctgcgttgcacctgctggcagctgaaccatggtcataaatacgccctggtcctcatctggcaagaaggagcttggcagacgcacgaacagataggccatgccgaccacgatgatcagatacagcaccaggtaacgccccgtactgcgcagaataccgcctacgctgtcggtgtagtggtgcgtgctcttctcgaacatgcggttaaaccagccgaagaagccttttttaccttccccgtgatcgcctttggcaatcggtttcagcatggtggcacaaagagccggagtcaggatcaacgctaccagtaccgacagcgccattgctgaaacaatggtaatagagaactgacgatagatagcaccagtagaaccgccaaagaaggccatcggtacgaataccgccgacagtaccatcgcgataccgaccagagcgccctgaatctgccccatcgacttacgggtagcttcttttggcggcaaaccttcttccgccataacacgctcaacgttttctaccacaacgatagcgtcatccaccaacaagccgatggcgagcaccatcccgaacattgttagcgtgtttatcgagaagccaaaggcggcaaggacggcaaaggtcccgagcaataccaccggtacggcaatggtcggaatcaacgtcgcgcggaagttctgcaggaacagatacatcaccaggaacacgaggatgatcgcttcgaccagcgttttaaccacttcgtgaatagagattttcacgaacggcgtggtgtcgtacgggtaaacaattttcagacctgacgggaagaacggttccatcttcgccagttcagcacggattgccgcagcggtatccagcgcgtttgcaccggtcgccagcttgatccccagaccggaagccggttggccgttaaactctgcgatgatgtcgtagttctcaccacccagctcaatcttcgccacatcacgcagcagtacgcgggaaccatcctgattcactttcagcaggattttgccgaactcttcagtagaggtcagacgcgtctgagcaataatagaggcgttaagctgttggcctttcaccggcggcgtaccaccgagctgacccgccgcaacctgggcgttctgcgctttgatggcggtaatgacatcaaccggcgttagctggaatttgttcagctcattcgggttcatccagatacgcatcgcgtactgtgaaccgaacaactgaacatcacccacgcccgacgtacggctgatggcatctttcatattcgccgctacgtagtcagagatatcctcctgcgtcatggtgccatcggtgttgataacgccgacaaccatcaggaagctgctggatgatttctcaacgctcaccccttgctgctgaacttcttgcggcagcaacggcatcgccagctgcagtttgttctgcacctgaacctgcgcgatatccgcatcagtaccagactcaaaggtcagggtgatctgcacggtacccgtggagtcactgttagaggacatgtacatcaggttatcgataccgttcatattctgttcgataacctgtgtcaccgtgtcctgcactgttttcgcatcagcgccggggtaggaggcggagatcgttactgccggcggtgcaatcgtaggatattgcgccaccggcagtttgaggatcgccagcccccctgccaacatgatgataatggcgatcacccacgcaaaaatcgggcgatcgataaagaaattaggcatgtcttaacggctcctgtttaagttaagacttggactgttcaggctgagcaccgcttgcggcttgctggttattatcagcggtaacttcttgtgcttttacctggacaccaggacgcactttctgcagcccacttattactacgcgatcgcctgctttcagaccttctgtcaccagccacttatcgccaatagcctggcttgcaacgatcggacgggtctccactttgtcatccgcgccaactaccagtacggtggcatcgccacgcggcgtacgggttacgccctgttgcgggactaaaatagcgtttggattaagcccttcttcaagacgtgcgcgcacgaacatacccggcagcagagtgtgatccgggttcgggaagatagcgcgtagggtgatagacccagtggtctgatcaacggtaacgtcagagaattccagcgtaccgtcctgcgggaacttaatgccgtcactggtgatcagcgacactttggctttgccgttctcttgtttcagcgtgccattcgccagttcctgtttcaggcgcaggaagtcgttgctggactgggtcacatcaacgtagatcggatcaagttgctgcacggttgccagcgcagtcgcctgaccgttctgtaccaatgcgccttccgtcacgttcgacttaccaatgcgaccgctaatcggagaggtgactttggtgtaagccagattgatccgcgcagtttcaacggcagctttcgccgcagttaccgcagcattcgcctgttgcgcatcagccagagcctgatcgtactcttgcttactgatgtactgagtaccgagcagtttctgataacgattcaccgtcaattgcgcgatattggctgcagcctgggctttcgccagatcacctttcgcactgtcgtatgtcgcctgataggtcgcaggatcaatctgatagagagagacacctgcttcgatgtcgctaccttctttgaaattacgcttcaggataatcccgctaacttgaggacgaacttctgcgatccggtaggcactggtgcgacccggaagctcggttgtgatctgcagaggttcagttttgactgttactacgccaacggcgggcatctgctggccactttgttgggcctgtttgtcgtcacatcctgttagggctaagctgcctgagagcatcagaacgaccgccagaggcgtaaaccctctgtttttgttcatatgtaaacctcgagtgtccgatttcaaattggtcaatggtcaaaagttaataaacccattgctgcgtttatattatcgtcgtgctatggtacatacattcacaaatgtatgtaaatctaacgcctgtaaattcacgaacatatggcacgaaaaaccaaacaagaagcgcaagaaacgcgccaacacatcctcgatgtggctctacgtcttttctcacagcagggggtatcatccacctcgctgggcgagattgcaaaagcagctggcgttacgcgcggtgcaatctactggcattttaaagacaagtcggatttgttcagtgagatctgggaactgtcagaatccaatattggtgaactagagcttgagtatcaggcaaaattccctggcgatccactctcagtattaagagagatattaattcatgttcttgaatccacggtgacagaagaacgacgtcgattattgatggagattatattccacaaatgcgaatttgtcggagaaatggctgttgtgcaacaggcacaacgtaatctctgtctggaaagttatgaccgtatagaacaaacgttaaaacattgtattgaagcgaaaatgttgcctgcggatttaatgacgcgtcgggcagcaattattatgcgcggctatatttccggcctgatggaaaactggctctttgccccgcaatcttttgatcttaaaaaagaagcccgcgattacgtcgccatcttactggagatgtatctcctgtgccccacgcttcgtaatcctgccactaacgaataaccctgaatctgactccaggatttttcctggacattttcgtcgttgctattctggttcactgcgtcgtgatattcttgcggtttgactttttcaggtcgttcttcaggttcagaaaccttcattcatcatgactatgttccagtattacaaacgatcacggcattttgttttttcagcatttattgcttttgtttttgtcttgttatgccagaacacggcgtttgcgcgggcgtcatcgaatggtgatctgccgacaaaagcggacctgcaggcgcaacttgactcactaaataaacaaaaagatctttctgctcaggacaaactggtgcagcaggatctgacagatacattagccaccctcgataaaatcgatcgcataaaagaagagacagttcagctacggcaaaaagtcgctgaagcgccggaaaaaatgcgccaggcgaccgcggcgttaacagcacttagcgatgtcgataacgacgaagaaacgcgcaaaattctgagtacgctttcgttgcgccagctggaaactcgcgttgcccaggcgctggacgatttgcaaaacgcacaaaacgatctggcgtcttataacagccagctggtttcgttacagacgcagcccgaacgcgtgcaaaatgcgatgtataacgcttcgcagcagctgcaacaaattcgcagtcgtctggatgggactgatgtcggcgagactgccttacgtcccagccagaaagtgttaatgcaggctcagcaggcgttgctgaatgcggagattgaccagcagcgtaaaagcctggaagggaacaccgtcttgcaggataccttgcaaaagcaacgtgattacgtgacggcgaacagcgcccgtctggagcaccagttgcagctgttgcaagaagcggtaaacagcaagcgcctgactttaactgaaaaaacggcgcaggaagccgtctccccggatgaagccgcgcgtattcaggctaatccgctggtgaaacaggaactggaaattaaccagcagttaagtcagcgtctgattaccgcgactgaaaacggtaatcagttgatgcagcaaaacattaaagtcaaaaactggctggagcgggcgctgcaatcggaacgcaatattaaagagcagattgccgtcctgaagggcagcctgctgttgtctcgtatcctttaccagcaacaacaaacgctgccctcggcggatgaactggaaaacatgaccaaccgcatcgcggatttgcgtctcgaacagtttgaagttaaccagcagcgtgatgcacttttccagagcgatgcgttcgtcaacaaactggaagaaggtcacaccaacgaagtcaacagcgaagttcacgatgcgttattgcaagtggttgatatgcgtcgcgaattgctggatcaactcaacaaacagttgggtaaccagctgatgatggccattaacctgcaaatcaaccagcagcagttaatgagtgtgtcgaaaaacctgaaatccatcctgactcagcaaatcttttgggtgaacagtaaccgtccaatggactgggactggatcaaagcgttcccgcaaagcctgaaagatgaatttaagtcgatgaaaatcacggtgaactggcaaaaagcctggcctgccgtttttatcgctttcctcgccggtttgccgctgctgttgattgccgggctgatccactggcgtctgggctggctgaaagcgtatcaacagaaactggcttccgctgtgggttccctgcgtaacgatagccagctcaacacaccaaaagcgatccttatcgacctgatccgcgcgctgccggtgtgcctgattattctcgcggttggcctgattctgttgaccatgcagctcaacatcagcgaactgctatggtcgttcagtaaaaaactggcgattttctggctggtgtttggcctgtgctggaaggtactggagaaaaatggcgttgccgtgcgtcacttcggcatgccggagcagcagaccagccactggcgtcggcaaattgtccgcatcagtctcgcgttgctgcctatccatttctggtctgtggtggcagaactttccccgctgcatctgatggatgatgtgctggggcaggcgatgattttcttcaacctgctgctgattgccttcctggtatggccaatgtgccgcgaaagctggcgtgataaagagtcgcacaccatgcgactggtcaccattaccgtgctgtcgattatcccgattgcattgatggtgctgactgccacgggttatttctacaccacgctgcgcctctccgggcgttggattgaaaccgtttatctggtgatcatctggaacttgctctaccagacggtattgcgcggcttaagcgtagcggcgcggcgtatcgcctggcgtcgtgcgctggcgcgtcggcagaatctggtgaaagagggcgcagaaggtgccgaaccgccggaagaacccaccattgcactggaacaggttaaccagcagacgctgcgtattaccatgttgctgatgtttgcgctgttcggtgtcatgttctgggcaatttggtccgatttgatcaccgtgttcagctatctcgacagcatcacgctctggcattacaacggcactgaagctggcgctgcggtggtgaaaaacgtcaccatgggcagtctgttgtttgcgattatcgcctcaatggtggcctgggcgttgattcgcaacctgcctggtttactggaagtgctggtgctctcgcgactgaatatgcgtcagggcgcgtcgtatgccattactaccatccttaactacatcattattgccgttggtgcgatgacggtgttcggatcgctgggcgtctcgtgggataaactccagtggctggcggcagcattatccgtaggtcttggttttggcttacaggagatcttcggtaactttgtctctggtttgatcatcctgttcgaacgtccggtgcgtattggtgatacggtaaccattggtagcttctcggggacggtaagtaagatccgtattcgtgcgacaacgattaccgatttcgatcgcaaagaagtgatcatcccgaacaaagcgtttgttaccgagcgtctgatcaactggtcgttgactgacactactacgcgtctggtgatccgtctcggcgtggcctatggctccgatctggaaaaagtgcgtaaagtgttactgaaggcggcgactgagcacccaagggtgatgcacgaaccaatgccggaagtcttctttacggcatttggtgccagcacgttggatcatgagctgcgtctgtatgtgcgtgaactgcgtgaccgtagtcgtactgtcgatgagctgaaccgtactatcgatcagctgtgccgtgaaaacgacatcaacattgcctttaaccagcttgaagtgcatctgcacaacgagaagggcgatgaggtgacggaagtcaaacgcgactacaaaggcgatgacccgacgccagcggtagggtaataaccaaagggggcgacatttagttgccccgagattactgacaaagtgcgcgttgttcatgccggatgcggcgtgaccgccttatccggcctacgaaaccgcaagaattcaatgtattgcaggagcggtgtaggcctgataagcgtagcgcatcaggcagttttgcgtttgcccacaatcttaggggacatttagcggccccatttatttctcacttttccgcctcatcatcgcgcgttaatttcttttcataatcgcgttttacaatatccagcgcgcgcagcacggtgcgggctgggatctgattttcttccagcagcacaatcaaatcgacagccagtttgacatcgtcaggggcattttccagtgacatactctctccattgctagcgggttaaacgcgctaacctgttttcgattttttccagcgcatggcggcagcgtgccaggcgcgcttcataggcttccacttcacgatgcagcgtttgctgttccacgagatcggtcacccgcgccagacgggctctgcgttcggcaaccatctcacgtagccgccgctcaaaatcctgatgctgaatacgtttacgctgccagcgggcaattttcggtggcgcactgtcccactcgcgcaatgaccaggcggaggcttcacgcgcgatggcttccagttgtgccgccagatgttccgccagccaggccacttgcggcagctgttgctgctcaactgcatgacgaagcgcagccagattatcgcccgcctcgtcgagacaagcctgtagtgttgtcgcacgagtctgaaaaagatgcctgtcgaaacgagcacttagcgtggcgaactgtgacaccggggcacaacgctgacgcagcgtagcgagctgtccttccagtttttccagcagcagggcggttttcacgataagacctcaatgaaaatgataattgttatgctaaagtagccactctgtaagctgacaacactcaatatgcaacgaatcattttaatcatcattggctggctggcggtagtgctgggtacgctgggcgtggtattaccggtattaccgacgacgccgtttatcctgctggcggcctggtgctttgcccgttcttccccgcgctttcacgcctggttgctgtaccgctcatggtttggcagctatctacgtttctggcagaaacatcatgcgatgccgcgcggcgtcaaaccgcgggcgattttgcttattttgctcacgtttgccatttctctgtggttcgtccagatgccatgggtgcgcatcatgttgctggtaattctcgcctgtttgcttttctatatgtggcgaattccggtgattgatgaaaagcaagaaaagcactgaagcacaacaatcgcagttgcaattattgcgtacagccagtacattctggcgttttcgagcacaggcgcaggcggtcaaaggttaaacaactgttacttttgatacgtttaaaacgcgccgtgagtaccaccgtaacaagcaggcatacacttatgaccgcgactgcacagcagcttgagtatctcaaaaatagcatcaaaagcattcaggactacccaaaacccggcattcttttccgcgatgtcaccagcttactggaagacccgaaagcttacgctctcagcatcgacttgctggttgagcgttacaaaaatgcgggcattaccaaagttgtcggcaccgaagcgcgtggcttcttatttggcgctcccgtagctctgggtctgggcgttggctttgtaccggtccgtaaaccgggcaaactgccgcgtgaaaccatcagtgaaacttacgacctggaatacggcaccgatcagctggagatccacgttgatgccatcaaaccgggcgacaaagttctggtggtggacgatctgctggcaaccggcggcactatcgaagcgaccgttaaactgatccgtcgtctgggtggtgaagtggctgacgctgcgttcattatcaacctgttcgatctcggcggcgaacagcgtctcgaaaaacagggcattaccagctacagccttgtcccgttcccgggccattaattatcgccagtcttgtgctgcccacgctacggacagcacaagatgtgcattcagcctcgccgttctgacggggctgtgttagcattaccccttcgtgaatccaccttccagcgtttcagagcctgccaatgagttatcaggtcttagcccgaaaatggcgcccacaaacctttgctgacgtcgtcggccaggaacatgtgctgaccgcactggcgaacggcttgtcgttagggcgtattcatcatgcttatcttttttccggtacccgtggcgtcggaaaaacctctatcgcccgactgctggcgaaggggctaaactgcgaaaccggcattaccgcgacgccgtgcggcgtgtgcgataactgtcgtgaaatcgagcaggggcgctttgtcgatctgattgaaatcgacgccgcctcgcgcaccaaagttgaagatacccgcgacctgctggataacgtccagtacgctccggcgcgtggtcgtttcaaagtttatctgatcgacgaagtgcatatgctgtcgcgccacagctttaacgcactgttaaaaacccttgaagagccgccggagcacgttaagtttctgctggcgacgaccgatccacagaaattgccggtgacgattttgtcgcgctgtttgcaatttcatctcaaggcgctggatgtcgagcaaattcgccatcaacttgagcacatcctcaacgaagaacatatcgctcacgagccgcgggcgttgcaattgctggcgcgcgccgctgaaggcagcctgcgagatgccttaagtctgaccgaccaggcgattgccagcggtgacggccaggtttcaacccaggcagtcagtgcgatgctgggtacgcttgacgacgatcaggcgctgtcgctggttgaagcgatggtcgaggccaacggcgagcgcgtaatggcgctgattaatgaagccgctgcccgtggtatcgagtgggaagcgttgctggtggaaatgctcggcctgttgcatcgtattgcgatggtacaactttcgcctgctgcacttggcaacgacatggccgccattgagctgcggatgcgtgaactggcgcgcaccataccgccgacggatattcagctttactatcagacgctgttgattggtcgcaaagaattaccgtatgcgccggaccgccgcatgggcgttgagatgacgctgctgcgcgcgctggcgttccatccacgtatgcctctgcctgagccagaagtgccacgccagtcctttgcgcccgtcgcgccaacggcagtaatgacgccaacccaggtgccgccgcaaccgcaatcagcgccgcagcaggcaccgactgtaccgctcccggaaaccaccagccaggtgctggcggcgcgccagcagttgcagcgcgtgcagggagcaaccaaagcaaaaaagagtgaaccggcagccgctacccgcgcgcggccggtgaataacgctgcgctggaaagactggcttcggtcaccgatcgcgttcaggcgcgtccggtgccatcggcgctggaaaaagcgccagccaaaaaagaagcgtatcgctggaaggctaccactccagtgatgcagcaaaaagaagtggtcgccacgccgaaggcgctgaaaaaagcgctggaacatgaaaaaacgccggaactggcggcgaagctggcggcagaagccattgagcgcgacgcgtgggcggcacaggtgagtcaactttcgctaccaaaactggtcgaacaggtggccttaaatgcctggaaagaggagagcgacaacgcagtatgtctgcatttgcgctcctctcagcggcatttgaacaaccgcggtgcacagcaaaaactggctgaagcgttgagcacgttaaaaggttcaacggttgaactgactatcgttgaagatgataatcccgcggtgcgtacgccgctggagtggcgtcaggcgatatacgaagaaaaacttgcgcaggcgcgcgagtccattattgcggataataatattcagaccctgcgtcggttcttcgatgcggagctggatgaagaaagtatccgccccatttgatcgtaagcacagcttacgttcgtcatccttaacgtgattgagagagaaacctatgtttggtaaaggcggtctgggtaacctgatgaagcaagcccagcagatgcaagaaaaaatgcagaaaatgcaggaagagatcgcgcagctggaagtcaccggcgaatctggcgcaggtctggtaaaagtgaccatcaacggtgcacacaactgccgtcgcgtagagatcgacccgagcctgctggaagacgacaaagagatgctggaagacctggtggctgcagcattcaacgacgcagcacgtcgtattgaagaaacgcagaaagaaaaaatggcctctgtatcctccggaatgcagctgccgcctggctttaagatgccgttctgatgcaaaccagcccgctgttaacacagcttatggaagcactgcgctgtctgccgggcgttggcccgaagtcggcgcagcgtatggcgttcacgctgcttcagcgcgatcgtagcggcgggatgcgtctggcgcaggcgctcacccgggcgatgtcggaaatcggccactgcgccgattgccgcactttcaccgaacaggaagtctgtaacatctgttcgaatccgcgtcgtcaggaaaacggtcaaatctgtgtggtggagagtccggcggacatttacgccattgagcagacggggcagttttcaggtcgttattttgtgttgatggggcacctgtcaccgctggacggcatcggtccggatgatatcgggcttgatcgtctggaacagcgtctggcagaggaaaaaatcactgaagtgatcctcgccaccaatcccacggttgaaggtgaagctaccgctaactacattgccgagctttgcgcgcaatatgacgtggaagccagccgaatcgctcatggcgtaccggttggcggcgaactggaaatggtcgatggcaccacgctgtcacactcccttgccgggcgtcataagattcgtttttaagcaaacgagagcaggatcacctgctctcgcttgaaattattctcccttgtccccatctctccctcatcctgtttttaaccttaaaatggcattattgaggtagacctacatgaaaggacaagaaactcgtggttttcagtcagaagtgaaacagcttctgcacctgatgatccattctctctattccaataaagaaatcttcctgcgtgagcttatctctaacgcctccgatgcggcggacaagctgcgtttccgtgcgctatctaacccggacctgtacgaaggtgatggcgaactgcgcgttcgtgtctctttcgataaagacaagcgcacgctgaccatctccgataacggcgtggggatgacccgcgacgaagtgattgaccatctggggactatcgctaaatccggtaccaaatcattcctcgaatccctgggttctgaccaggcgaaagacagccagctgatcggtcagttcggtgttggtttctactctgcgtttatcgtggccgacaaagtgaccgtgcgtactcgcgcggcaggcgaaaaaccagaaaatggcgtgttctgggaatcggctggcgaaggtgaatacaccgttgccgacatcaccaaagaagatcgtggtactgaaatcaccctgcatctgcgtgaaggcgaagacgagttcctcgatgactggcgcgtgcgttccatcattagcaaatactccgaccatatcgcgctgccggtagagatcgaaaaacgcgaagagaaagacggcgaaaccgttatctcctgggaaaaaatcaacaaagcgcaggcgctgtggactcgtaacaagtcggaaatcaccgatgaagagtacaaagagttctacaaacacatcgcccacgactttaacgatccgctgacctggagccacaaccgtgttgaaggtaagcaggagtacaccagcctgctgtacattccgtcccaggctccgtgggatatgtggaaccgcgatcataaacacggcctgaaactgtacgtccagcgtgtgttcatcatggacgacgcagaacagttcatgccgaactatctgcgcttcgtgcgtggtctgattgactccagcgatctgccgctgaacgtttcccgtgaaatcctccaggacagcacggtaacgcgtaacctgcgcaatgcgctgaccaagcgtgtgctgcaaatgctggaaaactggcgaaagacgacgcggaaaaataccagaccttctggcaacagtttggcctggtactgaaagaaggtccggcggaagatttcgctaaccaggaagcgatcgccaaactgctgcgttttgcttctactcataccgattcttctgcgcagaccgtgtctctggaagactacgtttcccgcatgaaagaagggcaggagaaaatctactacatcactgcagacagctatgcggcagcgaagagcagcccgcacctggaactgctgcgtaagaaaggcatcgaagttctgctgctttccgaccgcatcgatgagtggatgatgaactatctgactgagttcgacggtaaaccgttccagtcggtgtctaaagttgacgagtcgctggaaaaactggctgacgaagttgatgagagcgcgaaagaagcggagaaagcactgactccgttcatcgaccgtgtgaaagccctgctcggcgagcgcgtgaaagatgtccgtctgactcaccgtctgaccgatacgccagcgatcgtttcgaccgacgcggacgaaatgagcactcagatggcgaaactgttcgctgcggcgggccagaaagtgccagaagtgaaatacatcttcgaactgaacccggatcacgtactggtgaaacgtgcggcagatactgaagatgaagccaagttcagcgagtgggtagaactgctgctggatcaggcgctgctggcagaacgcggcacgctggaagatccgaacctgtttattcgtcgtatgaaccagctgctggtttcctgatgtcatgccggatgacctttgtgtcatccggcatttttcttttcattatctgcactttccgcaaattatctcgccattaaccgtttcagcccctggtgcctttcttgaggcaatcgcctgatggtggtatcgtttatcgctttttcaaaaaattcgacacattttaaggggattttcgcaatgcgtatcattctgcttggcgctccgggcgcggggaaagggactcaggctcagttcatcatggagaaatatggtattccgcaaatctccactggcgatatgctgcgtgctgcggtcaaatctggctccgagctgggtaaacaagcaaaagacattatggatgctggcaaactggtcaccgacgaactggtgatcgcgctggttaaagagcgcattgctcaggaagactgccgtaatggtttcctgttggacggcttcccgcgtaccattccgcaggcagacgcgatgaaagaagcgggcatcaatgttgattacgttctggaattcgacgtaccggacgaactgattgttgatcgtatcgtaggccgccgcgttcatgcgccgtctggtcgtgtttatcacgttaaattcaatccgccgaaagtagaaggcaaagacgacgttaccggtgaagaactgactacccgtaaagacgatcaggaagaaaccgtgcgtaaacgtctggttgaataccatcagatgactgcaccgctgatcggctactactccaaagaagcggaagcgggtaacaccaaatacgcgaaagttgacggcaccaagccggttgctgaagttcgcgctgatctggaaaaaatcctcggctaattcgaaagcgcgcacggacagtcccctcgccccctcggggagagggttagggtgaggggaacaggcccgcacaagcaaacttatcagcaatctcaggccggatattcattcggccttttacaaaaacctcaatctgcgctattcctttttctgatttgacctctcacagcaattagttcttcttcctcacttttccgctacaattatcaacaagttgaatcgataagaggcggtaatgcgtcagactaaaaccggtatcctgctggcaaacctgggtacgcccgatgcccccacacctgaagcggtaaaacgctatctgaaacaatttttaagcgacagacgcgtggttgatacctcacggttgttatggtggccgttgctgcgcggcgtgattttgccgctgcgctcgccgcgtgtggcgaagctgtacgcctcggtctggatggaagacggctcgccgctgatggtttacagccgccagcaacagcaggcgttggcacaacgtttaccggatacgcccgtagcgctgggcatgagctacggctcgccatcactggaaagcgccgtcgatgaactcctggcagagcatgtagatcatattgtggtgctgccgctttatccgcaattctcctgttctacggtcggtgcggtatgggatgaactggcacgcattctggcgcgcaaacgtagcattccggggatatcgtttattcgtgattacgccgataaccacgattacattaatgcactggcgaacagcgtacgcgcttcttttgccaaacatggcgaaccggatctgctgctgctctcttatcatggcattcctcagcgttatgcagatgaaggcgatgattacccgcaacgttgccgcacaacgactcgcgaactggcttccgcactggggatggcaccggaaaaagtgatgatgacctttcagtcgcgctttggccgggaaccctggctgatgccttataccgacgaaacgctgaaaatgctcggagaaaaaggcgtaggtcatattcaggtgatgtgcccgggctttgctgcggattgtctggagacgctggaagagattgccgagcaaaaccgtgaggtcttcctcggtgccggcgggaaaaaatatgaatatattccggcgcttaatgccacgccggaacatatcgaaatgatggccaatcttgttgccgcgtatcgctaaagctgagcggtaaagaactgagcgccgtcgcgaagagcctcgtcggcggttttcatcatccgtgaataatgcaaaaaggcatgcagcgtacctgggtagagtttgaactcacagggctgctgatgcgccgctaacgtctggtaaagcagacggctgtcatccagcagcggatcgaactccgccccggcaataaaacagggcggaacttcgcgagtgagatcattattaaacagacagtaatacggtgactcgcggtccgcgtcgttgcttaaatacgcctcttcatacatctgcaaatcctgttgcgttaagccatcccagacaccgcccaacagacgacgagtcacggaatcccgtaatccgtaaagcccataccacagcaaaacacccgcaattttaccgcaatcgatctgtttatcacgcaaccacaacgcactggcgagcgccagcatggcacctgcggaatcaccggcaaagccaatgcgggacatattgatttgataatcctccgcctgctggtggaaataacaacaagcagccacaatttcctctatcgcttgcggaaaacgcgcttcaggtgaaagggggtaatcaataccaatcaccgtacattggctgtagcttgccagcaggcgcatgatgcgatcgtgggtatcgagattgccgagaataaaaccgcctccatgcaaataaaatagcgtcgccgggctatctggctgcggacaaaagagacgtgtttccacctgcccatattttgttggaaccatgtaagctctggttgccatttctggagcgcccgcattccagaatcggcgctcaagcgtgtaatactgtcgttgctcagcaatcgttcccgttgcgggccaggacggtaaatccggctgaagagtattcacaacggtcttcatttcagcagaaataaggtccagaacaggtagtttgttttccggcttcatacaaaaactcctttcaaattacgtcattgtaaggaaccactgccatgaaaatgcgatcccgcctgctgatattgaaactggctgcgtctcgcgcgctcccgtcagattgtgttaacattcgccgctcagttaaccacccgtaaaaacaaccatgaaatttcccggtaaacgtaaatccaaacattacttccctgtaaatgcacgcgatccgctgcttcagcaattccagccagaaaacgaaaccagcgccgcctgggtcgtaggtattgaccagacgctggtcgatattgaagcgaaagtggatgatgaattcattgagcgttatggattaagcgccgggcattcactggtgattgaggatgacgtagccgaagcgctttatcaggagctaaaacagaaaaacctgattacccatcagtttgcgggtggcaccattggtaacaccatgcacaactactcggtgctcgcggacgaccgttcggtgctgctgggcgtcatgtgcagcaatattgaaattggcagttatgcctatcgttacctgtgtaacacttccagccgtaccgatcttaactatctacaaggcgtggatggcccgattggtcgttgctttacgctgattggcgagtccggggaacgtacctttgctatcagtccaggccacatgaaccagctgcgggctgaaagcattccggaagatgtgattgccggagcctcggcactggttctcacctcttatctggtgcgttgcaaaccgggtgaacccatgccggaagcaaccatgaaagccattgagtacgcgaagaaatataacgtaccggtggtgctgacgctgggcaccaagtttgtcattgccgagaatccgcagtggtggcagcaattcctcaaagaccacgtttctatccttgcgatgaacgaagatgaagccgaagcgttgaccggagaaagcgatccgttgttggcatctgacaaggcgctggactgggtagatctggtgctgtgcaccgccgggccaatcggcttgtatatggcgggctttaccgaagacgaagcgaaacgtaaaacccagcatccgctgctgccgggcgctatagcggaattcaaccagtatgagtttagccgcgccatgcgccacaaggattgccagaatccgctgcgtgtatattcgcacattgcgccgtacatgggcgggccggaaaaaatcatgaacactaatggagcgggggatggcgcattggcagcgttgctgcatgacattaccgccaacagctaccatcgtagcaacgtaccaaactccagcaaacataaattcacctggttaacttattcatcgttagcgcaggtgtgtaaatatgctaaccgtgtgagctatcaggtactgaaccagcattcacctcgtttaacgcgcggcttgccggagcgtgaagacagcctggaagagtcttactgggatcgttaagttatcgtcggttcgtaggccagataaggcgttcacgccgcatctggcatttggctctcgatgcccgatgcgacgctggcgcgtcttatcatgcctacatatttttcatattttacatccggcaaccaccgtttaccccgtcaccacttcacccgccggtggcgtttccagcagttccagcatagtacgggcaatttcacgttcacccatcactacctgattcgcgccacgttcggtgatatacgtcacttcatcgtcataatgggcgcgggcgataatctcaatatccgggtttttcgcgcgggcagacgccacaatctcacccgcttcataaccgttggggatcgtcaggatcagccattttgcacattccagatgcgccagttgcataatttcttcgttcgctgcattgcccaatacagcgcggaccccacgctctcgcagctcatcaacacgggttcgtgacgtctcaatcaccaccagcggaatatcagaggcgagcaatttctcccccagcaggctgcctacacgaccgtaacccaccaatagcgcatggttgcaaatatccactgggatctgtttctcttcttcgattgcctcttccagcgtctgctcttccagcgtttcggtcttcgccagatatttctccagtagtgcgaacagtaccgggttgagcataatcgacaggatcgcccctgccagtaccaggttttgtccggcctgcggcagtaaattcaatgccattcccagtcccgccaggataaacgcgaactcaccaatctgcgccaggctggcggcgatggttaatgccgtacgttgggagtgaccaaacagtcgcaccaggaaaaatgcggctaacgacttaccaaacagaataatcgccagcgtcgccagcactgccagcggttgctgaatcagaattaacggatcaaacaacatcccgacggagacaaaaaacagcaccgcaaacgcgtcgcgcaatggcagcgtatcgtgggcggcacggtgactcagttcagactcgttcagtaccatcccggcaaagaacgcaccgagtgcaaaggagacatcaaacagctctaccgcaccaaaggcaatccctaacgccagcgccagcaccgacagggtaaacagctcgcgagaaccggttgccgcgctgcgtgccataatccacggcaccagacggcgacctaccagcatcataatggcgataaatgcgatcactttgccgatggtgatccccatatcgactgcaagagtggcaaagcccacatcgccctgttccatcattcctgccactgcgggcagcaacaccagcgtcagaaccattaccaggtcttccacaatcaaccaaccgatggcgatttgcccacgctgactgtcaattaattgccgttcttcaagtgcgcgcagtaacaccacggtactggcggtggaaagacataaaccgaacacgataccggtcattaacgaccagcccagcacggcagagagcgccatacccagcagcgtcgccacggctatctgggcgatcgcaccgggaatggcgatggcctttaccgccatcaaatccttcagcgaaaaatgcaaaccgacgccgaacatcagcaaaataacgcccagttcagccagttccggcgcaagcttggtatcggcaacaaagcccggagtgaatggtcctgccagcacacccgctaacagatatcccaccagaggagaaatacgtagtttattggccagcatgccgaggataaaggcgagcacaaggccgccaacaatggtggtgataagcggggtggcgtgatgcattccgtctccttttcctggtggttattgtccatttttggccggggaaaccaaaattacaggtaatagtttatgacaatttcattgatgatgttcatgaataattattgaattttgcagaaaaatggaattagctgcaaaaaagcacggatcggaaaacagaaggcggtttaacagaggaaaggcttatggcgactgtaaaacgatgcagccaaagtttgcctttggctgcaatgaaatcagtctttatgccggttatcaggcaggaatatggtcaacatccccaatagtggcaggaaagcacagattttatagactaactcgatactggtgtgatcggcgataagccccagaactgccgctcccagacctcccataccaaaagcaaaaccgaaaaagagtccagaaaccataccgatacgtcccggaagcagctcctgagcgtaaaccagaatggcagagaatgccgaagcgaggataaatccaataatcaccgttaaaacccccgtccagtgcaggctggcgtagggtaaaatcagcgtaaacggcgcaacgccgaggatagagccccaaatcacatatttccgcccaattttatcccctacaggcccgccgatcaccgtacctgccgcaacggcaaacaggatggcaaacagatgaagctgagcattctggatagataatccgaatttttgcatcagataaaaggtgtaatagctgctgatgctcgccatatagaaatatttcgagaaaatgaggattaacagaatgctgaccgccagtaccactttgttgcgcggcagtggattgataatcgtcgctttgggttttcctttattcattcggtgctgtgccgagtaccaacggctgatttgcgccaacaccacgatcgccagcagtgccgcaagcacaaaccaggcaacgttgcctttgccataaggcgcgataatcaccgccgccagcaagggtcccagggaactgccaaagttgccgccgacctgaaagatagattgcgccaggccatgccgcccgccggaagccatacgggctacgcgagaagattccggatgaaagaccgatgaaccggtaccgaccagcgccgccgccagcagaactgcgccaaaactgcccgccagcgcaagcagcaccagaccacttaaggtaaagcacatgccaattggcaacgaccacggcatcggatatttatcggtccagtagccgaccactggttgcagtagcgaagaggcgagctggaaggtgagggttatcatgccaatctgcataaatgtcagagaaaattctgactgaagcagcggataaatcgccagaatcagcgattggatcatgtcgttcagcagatgtgagaggctgatagcacctaaaataccaaacgatgttcgggccttggtcgttgacgcagccgcgcccgccacaggctggggttgttcactcattgccataggaaagtcactttttcagggttgcgatgtaaagaatgatcttatttgtgattattacccgactaacatacctgtatgcgtcgcctgaaggaagtctcaacgccgaatacagaatttctaatctggatgcagatttatcttcaccggacgcagacttgtctatgatgtcgcgtcatactatttttcaacacgttgaaatcaggtcagggagagaagtatgaaattattgcagcggggcgtggcgttagcgctgttaaccacatttacactggcgagtgaaactgctctggcgtatgagcaggataaaacctacaaaattacagttctgcataccaatgatcatcatgggcatttttggcgcaatgaatatggcgaatatggtctggcggcgcaaaaaacgctggtggatggtatccgcaaagaggttgcggctgaaggcggtagcgtgctgctactttccggtggcgacattaacactggcgtgcccgagtctgacttacaggatgccgaacctgattttcgcggtatgaatctggtgggctatgacgcgatggcgatcggtaatcatgaatttgataatccgctcaccgtattacgccagcaggaaaagtgggccaagttcccgttgctttccgcgaatatctaccagaaaagtactggcgagcgcctgtttaaaccgtgggcgctgtttaagcgtcaggatctgaaaattgccgtcattgggctgacaaccgatgacacagcaaaaattggtaacccggaatacttcactgatgtcgaatttcgtaagcccgccgatgaagcgaagctggtgattcaggagctgcaacagacagaaaagccagacattattatcgcggcgacccatatggggcattacgataatggtgagcacggctctaacgcaccgggcgatgtggagatggcacgcgcgctgcctgccggatcgctggcgatgatcgtcggtggtcactcgcaagatccggtctgcatggcggcagaaaacaaaaaacaggtcgattacgtgccgggtacgccatgcaagccagatcaacaaaacggcatctggattgtgcaggcgcatgagtggggcaaatacgtgggacgggctgattttgagtttcgtaatggcgaaatgaaaatggttaactaccagctgattccggtgaacctgaagaagaaagtgacctgggaagacgggaaaagcgagcgcgtgctttacactcctgaaatcgctgaaaaccagcaaatgatctcgctgttatcaccgttccagaacaaaggcaaagcgcagctggaagtgaaaataggcgaaaccaatggtcgtctggaaggcgatcgtgacaaagtgcgttttgtacagaccaatatggggcggttgattctggcagcccaaatggatcgcactggtgccgactttgcggtgatgagcggaggcggaattcgtgattctatcgaagcaggcgatatcagctataaaaacgtgctgaaagtgcagccattcggcaatgtggtggtgtatgccgacatgaccggtaaagaggtgattgattacctgaccgccgtcgcgcagatgaagccagattcaggtgcctacccgcaatttgccaacgttagctttgtggcgaaagacggcaaactgaacgaccttaaaatcaaaggcgaaccggtcgatccggcgaaaacttaccgtatggcgacattaaacttcaatgccaccggcggtgatggatatccgcgccttgataacaaaccgggctatgtgaataccggctttattgatgccgaagtgctgaaagcgtatatccagaaaagctcgccgctggatgtgagtgtttatgaaccgaaaggtgaggtgagctggcagtaatccgaaagtgccggatgtttgcatccggcacaatgcttaatcgcggcgggcgatatcagcaaatttggcatcgaggatctttgccagatcgcctgccgccagttcgatatccagtccgcgcttgccgccggaaacataaatagtggcaaattcttgtgcgggggcgtcgataatcgttggcagacgttttttctgccccagtgggctaatccccccaactaggtatcccgtcgaacgctgcgcgaccatcggatcggccatctcaactttcttggcacccagcgcttttgctacttttttaagatccagttgacctgcgaccggcgtaacggccacggcaaggtgtttcatatcaccgttcactgccaccagcagcgttttgtagacctgatccggattcaaacctaattttttgacgacttcatcgccaaaattggtttcagccggatcgtgctcgtaggtatggatttgaaacgaaatcttgtttttttcgagtaatttaactgcgggtgtcatggtaattttcctgccttaaacaaaaaaacgaagcaagcatacgcctgatggcggtccaaaaaaagagtcatcttgcctaagagtattggcaggatggtgagattgagcgacaatcgagttacaccgtcgcttaaagtgacggcataataataaaaaaatgaaattcctctttgacgggccaatagcgatattggccatttttttagcgcaacatttgcggcaaattcccttctccatacaggtgtagtgcaccgaccgcgaccacatatcgccccggcggcatggcgcgtaatttatcccgccaggcgagatttcgctgatgcatcagcacatcgtacagcgactgactgaacgtattgggcagcgttatatcattattttgcggaggtgcattcagccaccagctcatcatttgttgcagcaaccgtgcgttggtatgccagtgggtcagcgtatcgtccagcagcgccagtcctttgtcagggagctggagcaacatggtaatctggttttcagccccttccagttcaatcacgggtttatgttgttgcttcgccgcctgcaataactggtaatcgataccgtattctgcccgcagccccagtttttgtgcctgcgtcgcctgaagaaccatcgcgatttgccacagcggttgagtagaaaagagcgacggagaaatgcccatctcctggctaatgtgctgcagattttggagttgctcctcgttaatgcgctcttccagcgcctcgcaagtaggcaaattagcaaaaggcgtatcgctggtggaaacatccgcctcgacgatcagcgcatcggcgtttttgagctttttgagcaaacgggtgggcaggggagccatatcgtggctacccatatgaatactgccaatcagatgaaaatggcgattgccgggaagggtgatatcgatggcaggccaggtgtaatgattaccgcgcagcgcggcccaaagcgtttttacccggtacaacagatccatacgacctccctttgtgaaatatcatgctagcgcgcggtgagggatggcgcaaatggagttggggacttgtttaatgtgtttgtatgattcagtatgttcttgcatcgctattcacagggaagcaacagttaaaaaccatgaaacaggcaacaagaaaaccgacgacacccggagatattcttctctatgaatatcaggaaccgctcgatttgaaaatcaatgagttagcagagttgctgcatgttcatcgtaatagcgtcagtgcactgatcaataacaatcgtaaactcaccactgagatggcattccgtctggcgaaagtttttgataccacagtcgattttaggctaaacctccaggcggcagttgatctttgggaagttgaaaacaacatgcgcacccaggaagaattgggacggattgaaacagtggctgaatatttggcacgccgtgaagagcgtgcaaaaaaggtcgcgtaaggccaaaacatcgcttcatctcgtaggccggataaggcgtttacgccgcatccggcagtcatgcgtcgatgccaaatgcgccgccctaaagcagcgcatccgcaatgacgtacttattccttcggtttaaaccgcagcaaccggttggcgttactcactacggtaatcgacgagagcgccattgccgctccggcaactaccgggttaagcagtgttccagtaaacggccacaaaataccggcggcgaccggaataccgatgctgttgtagataaaggcaccgagcaggttctgcttcatgttgcgcagcgttgcgcgggaaatcgcgagcgcatccgcaacgcccatcaggctatggcgcatcagggtaatcgccgcggtttcaatggcaacatcactgccgccacccatcgcaatgccgacatccgcctgggccagcgctggcgcgtcgttaatgccgtcgcccaccattgccacctgacgtccttcactttgcagacgtttgatcgcttcggctttaccgtccggcagcactccggcaatcacttcatcaattccagcttctttggcgatcgcattggcggtggttgggttatccccggtcaacatcaccagacgatatcccgctttatgcaggcgttgcagcgccgccacgctatcactacgcaacggatcgcgtacagccagcagggctactgctttcccgtcaatcgccagcagcacaggcgttgctccttgcgatgcctgagcagtaatctccgcttcgatagctttggtaccaacctgttgctcatttaacagcgcctgattgcccagcaataacgcatgaccttcagcttcaccgctcacgcccagcccgcgcaatgtgcggaaaccgttgacctgcggcagctgcatatcacctgctttatcgaggatcgcccgtgccagcggatggctggaaccttgctccagtgccgccgccagacgcaatgcctgcgcttcatcaacatcagcaaacgttttcactgcgacaacctgcggcttcccttcggtcagcgtcccggttttatcgaacacgacggtatcgagtgtactggcgcgttgcagcgcgtcggcgtcccgcaccagcacgccaaactcagccgcccgcccgacgccggaaataatcgacatcggcgtcgccagccccagcgcacacggacaggcgataatcagtaccgtggtggcaatcaccagggtataaacaatttgcggtgccggaccaaagaagtaccagattgccgcactgaccagcgcaatcaccaccaccacaggtacaaatacggctgagattttatccgccagctgaccgatttctggcttgctgctctgggcctggcgcaccatgcgaatgatccgtgacagcgtggtatggctgccaaccgcactggcacgaaacagcacgctaccgtcctgtaccactgtcccggcatggacgctttcgccttcgcctttttgctgcgggattggttcgcccgtcagcatcgcttcatccagccatgcttcgccctgggtaatctcgccatctaccggcacgcgatcgccggtcgtcaggcgcagcaacatacctggctgcacttccgccagaggcacgcttttttcaccttcgtcagtaaccaggcgcgccgtcggtggggttaaatcgagtaatttctccagcgccttagaagaacgctgacgtgcgcgtgcttccagcatatggccgagattgatcagaccgataatcatcgcgctggcttcgtaataaagatgtcgcgcttccatcgggaaccactgcggccacaggttgacgctcatcgaatagagccacgccacgccagtacccagcgccaccagcgtatccatcgtcgctgcaccgttcagcaggcttttccatgcactgcggtaaaaatggccgccggcgaaaaccatcaccgccagggttatcaggccgataaccaaccacaggctgcggttgtcagcggtgaccatcatgttatcgccaatcatcccccagaccatcaccgggatacccaccgccagtgcgacaattgcctgccagcggaagcgcttcatcgtagcaacggcggtttcctgctggcgctcacggcgtttcgcgtcatcttcaatcgcttccgcgccgtagcccgctttttccaccgcctgcactaaatcttgtggggaggcactgcccatcaccagcgcagtacgctccgccaggtttacccgtgcctgagtgacgcccggtacgctttgcagcgcattttgtacgcgggtgacacagctggcgcagctcatgccgctcagcagcaactgctggctgtcatcgtcatcggcggtcgctgccggaagcgcctcagaaaccgctgtcagtgcttccgacgggattgatgactccgccagcggtttagcctttgggtggcttacagatgcgtcataacccgcttgtttgatggtttcgatcagctgttctgcactggcagtcccggtaacgtgcgcttcagtgatagacacatccgcttgttccacatccgggcgctgttcgagactttctttcacgcgtttaacgcagtgaccgcaggacaggccgtccagggtcaggtcgataatttgtgacataaaacactcctttaagacagttttgactggctgtgataaaggttaaaccttccagcaaggggaaggtcaagaaattaataaaccaggcgagtaaaagtccgtaaagattaaaaaattggctcaatttgcatcaggattagacatttatctctttgttttcctgtagttaagttgcgggtgctaagttaaatcaggatgcctcaaaatcggcaccggggtgaggaattacctcccgcatctataaaaaggagttaacaaaagatgttagatgcaaacaaattacagcaggcagtggatcaggcttacacccaatttcactcacttaacggcggtcaaaatgccgactacattccctttctggcgaatgtgcctggtcaactggcggcagtggctatcgtgacctgcgatggcaaggtctatagtgcgggtgacagtgattaccgctttgcgctggaatccatctcgaaagtctgtacgttagcccttgcgttagaggatgtcggcccgcaggcggtacaggacaaaattggcgctgacccgaccggattgccctttaactcagttatcgccttagagttgcatggcggcaaaccgctttcgccactggtaaatgctggcgccattgccaccaccagcctgattaacgctgaaaatgttgaacaacgctggcagcgaattttacatatccaacagcaactggctggtgagcaggtagcgctctctgacgaagtcaaccagtcggaacaaacaaccaacttccataaccgggccattgcctggctgctgtactccgccggatatctctattgtgatgcaatggaagcctgtgacgtgtacacccgtcagtgctccacgctcctcaatactgttgaactggcaacacttggcgcgacgctggcggcggggggagtgaatccgctgacgcataaacgcgttcttcaggccgataacgtgccgtacattctggccgaaatgatgatggaagggctgtatggtcgctccggtgagtgggcatatcgcgttggtttaccgggcaaaagcggtgtaggtggcggtattctggcggtcgtccctggtgtgatgggaattgccgcgttctcaccaccgctggacgaagaaggcaacagtgttcgcggtcaaaaaatggtggcatcggtcgctaagcaactcggctataacgtgtttaagggctgatcatgatgaacacggaaggtaataacggtaacaaacccctcggtctatggaatgtcgtttccatcggtattggggcaatggtgggggcggggatcttcgcgctgctggggcaggctgcgttgctaatggaagcctcgacctgggtcgcctttgcttttggcggtattgtggcgatgttttccggttatgcctatgcgcgtctgggggcgagctatcccagcaatggcggcattatcgacttctttcgtcgcggattaggcaacggcgtcttttcgctggcgctctcgttactgtacctgttgacgctggcggtgagcatcgccatggtcgcccgtgcttttggcgcttatgccgtgcagtttttgcatgaaggcagccaggaggagcaccttattttgctctacgcgttggggatcattgcggtgatgacgcttttcaactccttaagcaaccatgcggtagggcggctggaagtgatcctcgtcggcattaaaatgatgatcctgttattgctgattattgccggtgtctggtcgctgcaaccggcgcatatttccgtctctgcgccccccagctccggtgcgttcttctcctgtatcgggataaccttccttgcctatgcgggctttggcatgatggcgaacgcggcggataaagtgaaagatccgcaggtcattatgccgcgggcgtttctggtggcgattggcgttaccacgttgctttatatctcgctggcactggttttgcttagcgatgtatcggcattagagttagaaaaatatgccgataccgccgtagcgcaggctgcttctccgctgctcggacatgtgggttatgtgatcgtcgtcatcggcgctttactggcgacggcttcagccattaacgcgaacctgttcgccgtgtttaacatcatggacaacatgggcagcgaacgcgaactgccgaagctaatgaataaatccctgtggcggcagagtacctggggcaacatcattgtcgtggtgttgattatgctgatgacggcggcgctaaatttaggctcactcgccagtgttgccagcgccacctttttgatttgctacctggcggtgtttgtggtggcgatccgcctgcgtcatgatattcacgcctcgttgccgattcttatcgttggtacgttggtgatgttgttggtgatcgttggctttatctacagtctgtggtcccagggtagccgtgcgttgatatggattattggctcactcttactcagccttattgtggcaatggtcatgaagcgcaataaaaccgtataacatctctctgtgcgcagtacttcctgtattattgtggtggcggtcgatattcgcactggcaaaaaaacgtgcttgaatatctgttgaaaccctttaacaaagcacaggaggcgttgcgcgaacgatgaacatcagcgatgtagcaaaaattaccggcctgaccagcaaagccattcgcttctatgaagagaaggggctggtgacgccgccgatgcgcagcgaaaacggttatcgcacctacacgcagcagcatctcaacgaactgaccttactgcgccaggcacggcaggtgggctttaacctggaagagagcggcgagctggtgaatctgtttaacgacccgcagcggcacagcgccgacgtcaaacggcgcacgctggagaaggtggcggagatcgaacgacacattgaggagctgcaatccatgcgcgaccagctgctggcactggcgaatgcctgccctggcgatgacagcgccgactgcccgattatcgaaaatctctccggctgctgtcatcatcgggcagggtgattaagacgagacggctcggatatgtagggttatcccttctatcgcaatgacttcaacatgcgtacctgcaccgagatcctcgctggcgctgacaggccatgaactgtcaccgacgcgcatatgaccgcgcccgttgaccagcggagattccagcacaaaacgtcggccaatcagctgctgcccgcgctggtttaaatgactatcgctgtgcttttgttcgcgcacccgccgcgacaaccatttccaccacagccaggcggcgagcagcgtcaggatggcaaacattaccccttgccactcccaacccagcggcaccagccagaccaccaggccggtaatcaccgctgccacgccgctccacaacaaataaccatttccgcccagcatctcggctgccagcagcaaaccgccgagactgagccagaaaatatgtggatgaacgaccattaactccatcatggctgagtccgtttgttggcgctgtctttcaccagctcggcaatcccggcaatcgaccccatcaggctgctggcctctaatggcatcatcactactttgctgttactggaggaaccgatctgctgtaacgcttcggtgtatttctgcgctacgaagtagttcaccgcctgaatatcaccggaggcgatggcttcagacaccattttggtggcgcgggcttctgcttcagcggaacgttcacgcgcttcagcctgtaaaaacgccgactgacgttcgccttccgctttcaggatttgcgactgtttttcaccttcggctttgaggatttccgcctgacggatcccttccgcttcaagaatgtaagcgcgtttggtacgttccgctttcatctgcgcgttcattgaagagataagctctgccggtgggcgcacgtcgcgaatttcaatacgggtgactttaatcccccacgggttggtggcttcatcgacaatacgcagcaggcgtgagttgatgctgtcgcgctgagagagcatttcgtcaagttccattgaacccaacacggtacggatgttagtcatggtcaggttgatgatcgccagctccagattgctgacttcataagccgcgcgcggcgcgtcaatcacctgaataaaacagactgcgtcgatggtaacgttggcgttatctttcgagataacttcctgggaagggatatcgagcacttgctccatcatattgatcttgcgaccaatgcgatccataaacggcaccaccagactgagccccggctgtaacgttttggtatagcgaccaaaacgttctaccgtccattgatagccctgcggcacgattttgacgcccgcgccgacaatgaccagcgcgacaaaaatgagaatcgggataaagataagcatcggaaaaacctcctgttgtaccgtccataatcagcaaaattgctgcttgattaaacaaattatacctgattactgaaagagagttcccccttattcctgcgaaggataaactgtttttagtaaaaatcagaaaaagggaacagcgatgcaggaaaatagtcctttgcttcagctacaaaacgtaggatatctggcgggtgatgcgaagattcttaataacatcaatttttcgctgcgtgctggcgaatttaagttaattaccggtccttctggttgtggcaaaagtacgctgctaaaaatagttgcttcattgatcagcccaaccagcggaacgttactgtttgaaggtgaggatgtcagcacactaaagccagaaatctaccgccagcaagtctcttactgcgcccagacgccgacgctgtttggcgatacggtatacgataatctgatctttccctggcagatccgtaaccagcagcctgacccggccatttttctcgattttctcgaacgcttcgctttgccggacagcattttgacgaaaaatatcgccgagctatctggtggtgaaaaacaacgcatctcactgattcgtaacctgcaatttatgccgaaggttttattgctggatgaaatcaccagtgcgctggatgaaagtaataaacataacgttaatgagatgatccatcgttatgtgcgcgagcaaaatattgccgtgctgtgggtgacacacgataaagacgaaattaatcatgcggataaagtgattacactgcaaccgcatgccggagaaatgcaggaagcacgctatgaactcgcataatattactaacgaatcattagcactggcattaatgctggtggtggtggcaatcttaattagccataaagaaaaactggcgctggagaaagatattctctggagcgtcgggcgagcgataattcagctgattattgtcggctatgtgctgaagtatattttcagcgtggatgatgccagcctgacattattgatggtgttatttatctgctttaatgcggcgtggaacgcgcaaaaacgcagtaaatatattgctaaagcttttatctcatcgtttgttgccattacggtcggggcgggaattaccctggcggtgctgattctctcagggtcgattgaatttatcccgatgcaggtgatccctatcgccgggatgattgccggtaacgccatggtagcggtggggttgtgttacaacaatttagggcaacgggtcattagcgaacagcaacagattcaggagaaactgagtcttggtgcgacgccgaagcaggcttcagcgatattgattcgcgacagtattcgcgcggctttaattccgacggtcgattcagcaaaaacggttggcttagtgagtttaccaggaatgatgtccgggctgatatttgccgggattgatccggtgaaggcgattaaatatcagattatggtgacctttatgctgctctcaaccgccagcttgtcgaccattattgcctgctatttaacctatcgtaagttttataattcgcgccaccagttggtggtgacgcaattgaagaagaaataatgcgatgccggatgcgcagcatcgcatccggcgttgtggttcatgtgccgatcaacggaatatcaatacaacaatgcatacagctggcggcgatacttcgacgccagtgcatcacccgtacccagcgcagcgaggatctcctggaacgttttacgcgtctgaccgtctgcggcggtgagatctttacgcagatgcccgaacagcaactccagcgcctcttcattgcgcccaacctggtgcagttgcagagccagttgcgtcgccagtgcggcatcttctggattctccgccacctgctgttgcaactgttgaatttccggcgtatcagccgcctgcttcagcagttcgatttgcgccaccagcccctggtagcgggtgtcctgatcctgcaacggaatggttttcagcaccgcttccgcatcttcagaacggttcagcgcaatcagcgtttctgccagcagcaggccgatctccccgttctgattcgacaactgccaggcgtctttcagcaatggcagggcatcggtgtaattgccttcctgcatcagttgcatcgcctgctgcgctttcagctcttcttcgcgcggcagcactttatccagcagggcgcggatcgcctcttccggttgcggcccctggaagccatctaccggttgcccgttctggaacagatacacggtcggaatcgcgcgcagaccaaactgggcggcaatcatctgctccgcgtcgcagtccagcttcgccagaataaattgcccgttgtactgcgccgcgaggctttccaggatcggggttaactgcaaacagtgctggctacgttcagaccaaaaatagaacagcaccggagtggtcatcgactgttcaagaacctgttgcaggttagattcgttaatgttgacaatattttctacggacatggagtcgctctctgttgtcgatattttctttgacatgggggcttaagcgcgcgcttcaactcacccctgcaatattttgtccatcacgcgccccggcagcaggcgcttaagcaccattactgcccaggtcaccagcgttaccggatagcgcatcttcggcttctcgctaataaaagcatggcgtactttgtccaccaccgcttccggtcccaacgtaaagcgggcggcgatgccgggattttcgactggtttatcactttgcgtctggttgacgttgtcggtgaagcgagtacgaatgggaccgggttcgatcaggctgactttaattccgctgtggcgtagctccatgcgcagcgcgtctgaccacgcctccagcgcatatttactggccgcgtaagcgccacgacccggcgtggagattaatcccatcaccgatgatgtcatcacaatacgcccttcaccgtgcggtaacatcgcgggtaacaggcgcatggtgagctggtgtgcgccgaaaaagttggcggaaaactgctgttccatctgcgcacggctgatggtggaaagggggccatacatgccgaatccggcattgttaaagatcccatacagacaattatcggtcagggcgatcacttcgtcggctgcgcgatcaacactttctggcgaatccagatcgatcaacacgccggtaaatcccatgctgttcatacgctcaacatcatccggtttccggcaacctgccagcacatgaaaaccctggcgttttaattcgagcgcgctttccaggccaattccactggaacatccggtaattaagaccgatttttgcataactttacctgtcaggatctccgttgctttatgagtcatgatttactaaaggctgcaactgcttcgccatccagtcggcaataaacggctgggcgtcgcggttgggatgaataccgtcatcctgcatccattgtggcttgaggtagacctcttccataaaaaagggcagcagcggaacatcaaactctttggcgagtttggggtaaatggcgctaaaggcttcattataacggcgaccatagtttgcaggcagacgtatttgcattaacaatggttcagcgttggcggctttgacatcctgcaaaatctggcgcagcgtttgctcggtttgctgtggctgaaaaccacgcaaaccgtcattgccgcccagttcaaccagcacccaacgcggctgatgctgtttcagcagagccggaaggcgcgccagtccttgttgcgaggtgtcgccgctgatgctggcattaactaccgacgttttactctgccacttatcattcaacaaggcaggccaggccgcgctggcagacattcgatacccggcgctcaggctatcacccagaatcaataacgtgtccgctgcggcggcacggaaggttaacaggaccaggaacaggaagggcaaatgccagcggaaaacattgttgaagttcatcatcttaagaagtccgtcggtcagggggagcatgaactctccatcctcaccggagttgagctggttgtcaaacgtggcgagaccatcgcactggtgggcgagtcgggatcgggtaagtcaaccttgctggcgatcctcgccgggcttgatgacggcagcagtggcgaagtgagtctggtgggacaaccgctacataatatggacgaagaagcgcgggcaaagttgcgcgcgaagcacgtcggctttgtttttcagtcatttatgttaattcctacccttaacgcgctggaaaacgtcgagcttccggctctgctgcgcggtgagagtagcgcggaaagtcgtaacggggcgaaagcgttgctcgaacagttagggctgggtaaacgtctggatcatcttccggcacagctttccggcggtgaacagcaacgagtggcgctggcacgagcctttaatggtcgacctgatgtgctgtttgccgacgaacccaccggcaaccttgaccgccagacgggcgataaaattgccgacctgctgttttccctcaaccgtgaacatggcaccacgttgattatggtgacccacgacctgcaactggcggcacgctgcgaccgctgcttacggctggtgaacgggcagttgcaggaggaagcatgattgcacgttggttctggcgcgaatggcgttcgccgtcgctattaattgtctggctggcgctaagcctggcggtggcctgcgtgctggcgctgggtaatatcagcgatcgcatggaaaaaggcttaagccagcaaagccgtgaatttatggcgggcgatcgggcgttgcgcagttcgcgcgaagtgccgcaagcgtggctggaggaagcgcaaaagcgcggcctgaaagtcggcaagcagctgactttcgccaccatgacatttgcaggcgacacaccgcagctggcgaacgttaaagcggtggatgatatctacccgatgtatggcgatctgcaaaccaatccccctggcctgaaaccgcaggcgggcagcgtattgctggccccacgcctgatggcactgcttaacctgaaaacgggcgacaccattgacgtgggcgatgccaccttgcggattgccggagaagtgattcaggaaccggattccggttttaaccccttccagatggctccgcgtctgatgatgaatctggcggatgtcgataaaaccggagccgtgcagccggggagtcgggtcacctggcgctataaattcggcggcagtgagaaccagctcgacagctatgagaaatggttgttacctcagcttaaacccgaacaacgctggtacggtctggaacaggacgaaggcgcgctggggcgatcgatggaacgctcgcaacagttcctgctgctttcggcgcttctgaccttgctgctggcagtggcagcagtggcggtagcgatgaatcattactgtcgcagtcgctacgatctggtggcgatcctcaaaacgctgggggcagggcgagcgcaactgcgtaagctaatcgtcggtcagtggttgatggtgctgacgctttcagccgttaccggtggggcgataggcctgttgttcgaaaacgtgttgatggtgctgctcaagcccgttctgcctgctgcactaccgccagccagcctctggccgtggctatgggcgctgggcaccatgacggtcatctcgctgctggtggggctacgaccataccgcttgttgctggcaacgcagcctttacgcgtattacgtaatgatgtggtagcgaacgtctggccgctgaagttttatctgccgattgtcagtgtagtggttgtgctgctgctcgccggattaatggggggcagtatgctgctctgggcggtgctggcgggcgcggtagtactggctttgctgtgcggtgtgctgggctggatgctgctgaatgtacttcgccgcatgacgctgaaatcgctgcctctgcgcctggcggtcagccgcctgttacgtcagccgtggtcaacgttaagccagctttcggcattttcgctctcctttatgctgctggcactgctgctggtgttgcgtggtgatctgctcgaccgctggcagcagcagctacctccagaaagcccgaactactttttaattaacatcgccacagaacaggtagcaccgctaaaagcgttcctcgcggaacatcagatagtcccggaatcgttttatccggtggtgcgggcgcggctgacggcgattaacgataagccgacagaaggtaatgaagatgaggcgcttaaccgcgaactcaatcttacctggcaaaatacgcggcccgatcataatccgattgtcgccggtaactggccgccaaaagccgatgaagtgtcgatggaagaggggctggcgaaacgcttaaaggttgccctcggtgataccgtgacttttatgggcgatacccaggagttccgcgctaaagtgaccagcctgcgcaaagtggactgggaaagtctgcggcctaatttctattttattttcccggaaggggcattagacgggcaaccgcagagctggcttaccagtttccgctgggagaatggcaacggcatgttgacgcaactcaaccgccagttcccgaccattagcctgttagacattggcgcgattttaaaacaggtcggtcaggtgctggagcaggtaagtcgggcgctggaggtgatggtggtgctggtcaccgcctgcggtatgttgctgttgctggcacaggtgcaggtgggtatgcgtcagcgccaccaggagctggtggtgtggcgcacactcggtgcggggaaaaaactgctgcgtaccacgttgtggtgtgagttcgccatgcttgggtttgtttccggcctggtggccgcaattggtgcggaaacggcgctggcagtgttgcaggcgaaagtgtttgattttccgtgggagccagactggcgattgtggattgttctgccgtgcagcggagcgctgctgctgtcgcttttcggcggctggctgggtgcgcgactggttaagggtaaggcgctgttcaggcagtttgcggggtgatgagagtaaataaggggcgttctggttgaatggaacgccttgtttaaattaattctacaatatgtttcattgatgatgttattgaattggtgatttcctatctttctattgctgatattaatctgaatcggtggagtttattgattttaaatatagccctacaaaaataactcagactaataaaatcataaatcatatgcgttgaatggatattatccatatagtgaatttgttgatgatgaattcatctgtgctaaaaatgttagtttaataaaatattgaaagtgacctgtaataacagttgttgttgattgagaacaaataagtttatgtgaaaaatatataaatacattagctggtcttgtgtgtcattttattttttttgttgctaacacagggatatgaacaataactaaaagggcactttatatgagcggaaaaccagcggcgcgtcagggagatatgactcagtatggcggtcccattgtccagggttcggcaggtgtaagaattggcgcgccaactggcgtggcgtgctcggtgtgtccgggcgggatgacttcgggcaacccggtaaatccgctgctgggggcgaaggtgctgcccggcgagacggaccttgcgctgcccggcccgctgccgttcattctctcccgcacctacagcagctaccggacgaagacgcctgcaccggtggggatttttggccccggctggaaagcgccttctgatatccgcttacagatacgcgatgatgcactggtactcaacgacaacggcggacggagcattcactttgagccgctgctgccgggtgaggcggtgtacagccgcagcgagtccctgtggctggtgcgtggcggtaaggcaacgcagccggacggccatacgctggcacggctgtgggcgtcgctgccgccggatatccggttaagcccgcatctttacctggcgaccaacagcgcacaggggccgtggtggatactggggtggtcagagctggtgccgggtgctgaggacgtactgccagcgccgctgccgccgtaccgggtgcttaccgggctggcagaccgcttcgggcggacgctgacgtaccggcgtgaggccgccggtgacctggccggggaaatcaccggcgtgacggacggtgccgggcgggagttccgtctggtgctgaccacgcaggcgcagcgtgcggaagaggcccgtaaacagcgcaccgcttccttatcttcccctgacacaccccgccctctctcagcctcagcgttccccgacacactgcccggtacsgaatacggcactgacagcggtatccgtctttcggcggtgtggctgatgcacgacccggaatacccggaaaatttacctgccgcgccactggtgtgctacgactggacgccacgcggtgagctggcggcggtgtatgaccgcagcggtacgcagatgcgccactttacttacgatgataaataccggggccggatggtggggcaccgttatgcaggcaggccggagatgcgctaccgctacgacgatgcggggcgggtggtggagcaactgaacccggcagggttaagctaccgctatctttatgagcaggaccgcatcaccgtcaccgacagcctgaaccggcgtgaggtgctgcatacagagggcggggccgggctgaaacgggtggtgaaaaaagaactggcggacggcagcgtcacgcgcagcgggtatgacgcggcaggaaggctcacggcgcagacggacgcgtcgggacggcggacagagtacggtctgaatgtggtgtccggcgatatcacggacatcaccacaccggacgggcgggagacgaaattttactataacgacgggaaccagctgacggcggtggtgtccccggacgggctggagagccgccgggaatatgatgaaccgggcaggctggtatcggagacatcgcgcagcggggagacagtacgctaccgctacgatgacgcgcacagtgagttaccggccacgacaacagatgcgacgggcagcacccggcagatgacctggagccgctacgggcagttgctggcgttcaccgactgctcgggctaccagacccgttatgaatacgaccgcttcggccagatgacggcggtccaccgcgaggaaggcatcagcctttaccgccgctatgacaaccgtggccggttaacctcggtgaaagacgcacagggccgtgaaacgcggtatgaatacaacgccgcaggcgacctgactgccgttatcaccccggacggcaaccggagcgagacacagtacgatgcgtggggaaaggcggtcagcaccacgcagggcgggctgacgcgcagtatggagtacgatgctgccggacgtgtcatcagcctgaccaacgagaacggcagccacagcgtcttcagttacgatgcgctggaccggctggtacagcagggcggctttgacgggcggacgcaacgttatcattatgacctgaccggaaaactcacgcagagtgaagatgaggggcttrtcaccctctggcactacgaygcgtcggaccgcatcacgcaccggacggtgaacggcgacccggcagagcagtggcagtatgacggccacggctggctgagagaaatcagccacctgagcgaaggccaccgtgtcgctgtccactacggctacgacgataagggccgcctgacgggcgaacggcagacggtggagaacccggagacgggggaactgctgtggcagcatgagacgaaacacgcctacaacgaacaggggctggcaaaccgcgtcacgccggacagcctgccgccggtggagtggctgacctacggcagcggttacctggcgggcatgaagctgggcgggacgccgctggtcgagtatacgcgggacaggctgcaccgggagacggtgcgcagcttcggcagcagggcaggcagtaatgccgcatatgaactgaccagcacatacacccccgcaggccagttacagagccagcacctgaacagcctggtgtatgaccgtgactacgggtggaatgacaacggcgacctggtgcgcatcagcggccgcgacagacgcgggaatacggctacagtgccacgggcaggctggagagcgtgcgcaccctcgcaccggacctggacatccgcatcccgtatgccacggacccggcgggcaaccggctgccggacccggagctgcacccggacagtaccctcacagtgtggccggataaccgcatcgcagaggatgcgcactatgtctaccgctacgatgaatacggcaggctggcggagaagacggaccgcatcccggcgggtgtgatacggacggacgacgagcgcacccatcactaccattacgacagcctgcaccgcctggtccattacatccgtatccaatatgaggagccgctggtcgagagccgatacctttacgacccgctgggtcgccggacagggaaacgggtgtggcgtcgcgagcgtgacctgacgggatggatgtcgctgtcgcggaaaccggaggtgacgtggtacgggtgggacggcgaccggctgacgacggtacagaccgacaccacgcgtatccagacggtatatcagccggggagcttcgcgccgctcatccgcatcgaaacagacaacggcgagcgggagaaagcgcagcgccgcagcctggcggagaagctgcagcaggaagggagcgaggacgggcacggcgtggtatttccggctgaactggtgcggctgctggacagactggaggaagaaatccgggcagaccgcgtgagcagtgaaagccgggcgtggcttgcgcagtgcgggctgacggtggagcaactggccagacaggtggagccggaatacacaccggcgcgaaaagctcatctttatcactgcgaccaccggggactgccgctggcgcttatcagcgaagacggcaatacggcgtggagcgcggaatatgatgaatggggcaaccagcttaatgaggagaacccgcatcatgtgtatcagccgtaccgtctgccagggcagcagcatgatgaggaatcagggctgtactataaccgtcaccggtactacgatccgttgcaggggcggtatattactcaggacccgatggggttgaaagggggatggaatttatatcagtatcctttaaatccactacaacaaattgaccctatgggattattgcagacttgggatgatgccagatctggagcatgtacggggggagtttgtggtgttctttcacgtataataggaccaagtaaatttgatagtactgcagatgctgcgttagatgctttgaaagaaacgcagaatagatctctatgtaatgatatggaatactctggtattgtctgtaaagatactaatggaaaatattttgcatctaaggcagaaactgataatttaagaaaggagtcatatcctctgaaaagaaaatgtcccacaggtacagatagagttgctgcttatcatactcacggtgcagatagtcatggcgattatgttgatgaatttttttcaagtagcgataaaaatcttgtaagaagtaaagataataatcttgaagcattttatctcgcaacacctgatggacgatttgaggcgcttaataataaaggagaatatatttttatcagaaatagtgtsatgctgccaacttactgatttagtgtatgatggtgtttttgaggtgctccagtggcttctgtttctatcagctgtccctcctgttcagctactgacggggtggtgcgtaacggcaaaagcaccgccggacatcagcgctatctctgctctcactgccgtaaaacatggcaactgcagttcacttacaccgcttctcaacccggtacgcaccagaaaatcattgatatggccatgaatggcgttggatgccgggcaactgcccgcattatgggcgttggcctcaacacggattttacgtcacttaaaaaactcaggccgcagtcggtaacctcgcrcatacarccgggcagtgaygtsatygtctgcgctggaaatggacgaacaktggggctatgtcggggctaaatcgcgccagcgctggctgttttacgcgtatgacaggctccggaagacggttgttgcgcacgtattcggtgaacgcactatggcgacgctggggcgtcttatgagcctgctgtcaccctttgacgtggtgatatggatgacggatggctggccgctgtatgaatcccgcctgaagggaaagctgcacgtaatcagcaagcgatatacgcagcgaattgagcggcataacctgaatctgaggcagcacctggcacggctgggacggaagtcgctgtcgttctcaaaatcggtggagctgcatgacaaagtcatcgggcattatctgaacataaaacactatcaataagttggagtcattacccagaaatagtgtcccgggattgagttcagtatgcataccgtatcatgattaattttagtgcttttattagtggggcctataaggagattcaatgaaatatagttcaatattttcgatgctttcattttttatactatttgcctgtaatgagacagctgtttacggttctgatgaaaacattatttttatgaggtatgtggaaaaattacatttagataaatactctgttaaaaatacggtaaaaactgaaacaatggcgatacaattagctgaaatatatgttaggtatcgctatggcgaacggattgcagaagaagaaaaaccatatttaattacggaactaccagatagttgggttgttgagggagcaaagttaccttatgaagttgcgggtggtgtatttattatagaaattaataagaaaaatggatgtgttttgaatttcctacatagtaaataatgctggcgctgatggatgcggatggaaacattgcgtggagcggggagtatgatgagtggggcaaccagctgaatgaagagaacccgcatcacctgcaccagccgtaccggctgccggggcagcagtatgataaggagtcggggctgtactacaaccggaaccggtactacgatccgttgcaggggcggtatatcactcaggacccgatagggctggaggggggatggagtctgtatgcgtatccgctgaatccggtgaatggtattgatccattagggttaagtcctgcagatgtagcgttaatgcgaaaaaagaacaactaaaccatcaaagagcatgggatatattatctgatacttatgatgatatgaagagattaaatttaggtgggactgatcaatttttccattgtatggcattttgtcgagtgtctaaattaaatgacgctggtgttagccgatcagcgaaagggctgggttatgaaaaagagattagagattacgggttaaatatgttcggtatgtacggcagaaaagtaaagttatcccattctgagatgattgaagataataaaaaagacttggctgtaaatgaacatgggttgacatgtccattaacacaagattgctcaaatagatgtattgattatattaatccagagcataaaaaaacgataaaggctttacaagatgctggctatctcaagtaacatctcaaagatggtaatatttatttttgctattataatcgttgtttttttatgcgtgactacttatctttatttacacaaagatgaatctcttgtaagtaagcattacataaactatatggcaataccagaaagtgatggagtttttacatggctcccagatttttttccgcacgtagcggtggatatatcaatatccacaaatgtagaagatgattattttttttcttatttttccctaacaatcgatgatgggggaggtttaagaaaacattgacggtgagggccagggaacaagtggcgaaaatcgtatcagataatgatccagatacaaaaaaagtgtggtgtaaatatggtaaaataccagggcaaggggatagcgtaaaccttttttttgttggtgaaattaatgttacgcattattttataacaaatattggagctggattgcctgatgcttgtgcagagtaattgcttgaattaagagtctatcccatatcgaagtcgtcaacttcgtagtgaggaaaagtaaaattcctgactgagaaaagacatgtcggctattgtgtaaagccatatagctcagacgatgaatatctactcgtattcagttgtttattgagggtgagttccgaccctgaaacaacaaataaaatgaacagtcagagagtttacatagaattgcactggtcttttacgatatctgacattgtgtaatacatattcagccatgcattaattaaaatgttacgtgtttaatgtgagtccctatctgaaaataaataatccttccggattaaaataaattcttgccgggaaagaaagaggaaataaaccattagcggaaaaccagcggcacgccagggtgacatgccccagtacggcggcccgatagtccaaggttcagcgggggtactgatagtcgcgccgactgcatcgagaactccatacaactttttacggaacgtcacctgataaaatttgttcagtatcgtcttttgagattctcaaggttatggagtaaccagacagaacggacaccactgtcggagataaaaccccctgtttacgcagctcgttgctggcccggtgctgaccatgtgtcgggaaagcgacggcgtaatcaacaacagcctgttcagttgcctcatcggtacggttcttaaggttaggagcgcggcgactacgattaatctgcgcatccacaccgccttcagcgaccagttcgcggtaacgataaaacgtatcacgcgaaacgcccatgattttacaggcttttgatacgttgctgagttcttcagccagattgagcaaaccggctttgtgtttgatgacgggattggcagtatgaagcatgagagttacctcttgttttggataaggattcgacactcatatcaaaaccggtaactctcaacctttcaaggccatgtgtcagatcaagtcgcgactaatacaaatacgtccctcattaccgcgccttaacccattccgccacttccgcccactcaccgcgaaagacaactttttccgcttttttctcaagctgatagcgatacattgggtcgtaatattctttaagtaacggcaccagccaggccagatgaccgtcggtgctaccggttgcgagttgcgttgtcagcgctgcatccagccttgcagccagttcgttatagcgctgtagccccagccgacgcttgatcgccgaaagtccgtgatgcaggtattcgcaatactcctgccagccctgttcgtcgccgtacgcgtgggtaaaatcatgatgcatacgcaagaaatactcttcgttcaggcgctcaagacggatctcaaacggatcttctaccaccgcaatcgccgcctgagtcattcgctcgcgcaggcattccggcaggtgattcgaaccgatcatccggctttcgtcttccagcacccacaggcgcaaattctgacgggcgtcggtttttagcatttcggcagccagcaggttttcaaaactcgcctggctaagttgtggttgtaaggtgcgaccaaacgccgaaccgcgatgacgcgccagcccttccagatcaacaccgttcggctgttgttgcactaacagcgttttgccgcagccggtacaaccgccaatcagcactatcggtttttgtgccagttcaatagtcgcctgaatcgtggtctggcgcagtgccttataaccgccttccaccagcggataatcaatccccgctgcatgcaaccagctttgcacaatatgtgagcgctgaccgccacgggcgcagcagagaataccttgcggattttgcaggcacgctgcccgccaggcgtccatacgctgctgacgaatttcacccgccaccagtttatgacccagcgccagcgccgcgtctgacccttgctgtttataacaggtgccaacggcggcgcgttcatcgttattcattaacggcagattgatagcggcgggcattgcgccttgctcaaactcgataggggcgcgaacatcaataatgggcgtatcagcaatcagcagggcacgatagtcctgttccgtgtgtctctcttgcatagttaaaagtgaacctcaaatcagcttgcgcgctattttacgcgccaacgcgcaaggaaacttgatttttaactgcgtgggttgccgaaaatttctaaaaatccgctgatttccggcctgcgctgggtaaacaaggtcacaatatcttctaccgctttgccgctgccaaatttgcgccatgccagactcaatggcgaaggagggcgcatcgttgggattacccggctaactagttgttgattatcgatcattgactggcaaagcgattttggcaaaaaaccaatgccaacgcccgcaagatgggcggcgattttcgtttccatatcaggaacaataatctctttttgcccaggcaatcgccaggcgacgcgtttggttaaggtgcgggcgctgtcttcaatattgaccgccggaaagcgccgcaactgcgcttctgttagcggctcttcaacgttcgccagcggatgatccgccgccatgacaaagcgccattgcaccgatcctaagggatcaagactaaaggtatttgccagcgcctcggttcccgtgacgccgatagccagtgaaaaaccttcgtataatagcgaatcccagacgcccatatagatttgtcgggagatgtgaaactgggtaaaggggtaacgttcattcagccacgccagcaactgggcgacggcctgggggtggtagagcaggttgttgatgacaatattcacctggcgttccacgccatcattcacctgttgcagctcgcttggcatactttccagccagctcagccagtctctggcctgggaaagtagatgctcgccagccgctgtcaacgtcacgctgcgagtcgtgcggaaaaacagcgctactccggtattctcttccagaagtttaatgcgataactgatcgtcgccgtggttttacataatcgttctgccgcttttgaaaaacttcctgtttcagcaaccgcaatgaaagtccgcaaggtttctggatcgaacatcttcaggtatccccttttaaatccgcaagttgcgtgattttcttatcctctgatttatcagtatttttacatgataaccctgttcaatttgtggactaaatctagttttggaaaaatattccaacttttgtattgatgttgttctcttaaggttttagattgcctgttattgaaaccaagctgaccggtcggcgatggttgaacggaattatgttacaaggacaaaaagatgaaacttcaggtattaccgttaagtcaggaagcctttagtgcttatggcgacgtaatcgaaactcagcaacgggattttttccatattaacaatggcctggtggagcgttaccacgatttggcgctggttgagattcttgagcaagaccgtacgcttatcagcattaaccgcgcgcaaccggcgaatctgccgctgaccatttacgaactcgaacgtcatccgctgggcactcaggcctttatcccgatgaaaggtgaagtgtttgtggtggtcgtggcgttaggcgacgacaaaccagacctgtcaacgctgcgggcgtttatcaccaacggcgaacagggagtgaattaccatcgtaacgtctggcatcacccacttttcgcctggcagcgcgtcaccgattttctgaccatcgatcgcggcggcagtgacaactgtgatgttgaaagtattcctgaacaggaactctgttttgcgtgacgcctgcaaccgacttgcataagataaactaattgttcattgtttatgctcacttgtaggtcggagttaacgtaggtatgacggaagttagacggcgcggcaggccaggacaggcggagcctgtggcacagaagggcgcacaggcgttagagcggggaattgcgattctgcaatatctggaaaaaagtgggggaagttcgtcggttagcgatatttctctcaatctggatttgccgctctccacgacctttcgcttgctgaaggttttacaggcagcggattttgtctatcaggacagtcaattaggctggtggcatataggattaggtgtctttaacgtcggtgcggcgtacatccataaccgcgatgtcctctccgtcgccgggccgtttatgcgccgcctgatgttactttccggcgaaacggtcaatgtcgcgatccgtaacggcaatgaagcagtattaattggtcagttagagtgtaaatcaatggtcaggatgtgtgcgccactgggcagtcgtctgccgctgcatgcttccggtgcgggcaaagcgctgctttatccgctggcggaagaggagttgatgagcatcattctgcaaaccggtttgcagcagtttacgccaactacgcttgtggatatgcccaccttgctgaaggacctggaacaagcgcgtgaactgggctataccgtagataaagaagagcatgttgtaggtctgaattgcatagcttcagcaatttacgatgatgtcggtagcgttgttgccgctatctccatctccgggccttcatcaagactgacagaagatcgttttgtcagtcagggtgagctggtcagagacaccgcccgcgatatcagcacggcgttgggactgaaagcacatccatagtgtctgtcgcatcccgctctgcggagcgggtttttttgacaaaatttgaaagttggaaaatttttccaattaatagaggtaggaataaaatggcaaaaatgagagccgttgacgcggcaatgtatgtgctggagaaagaaggtatcaccaccgccttcggcgttccgggagctgcaatcaatccgttctactcagcgatgcgtaagcacggcggtattcgtcacattctggcgcgtcatgtggaaggtgcttcgcacatggcggaaggttatacccgcgcaacggcagggaatatcggcgtatgtctggggacttccggtcctgcgggcacggacatgatcaccgcgctctattctgcttctgctgattccattcctattctgtgtattactggccaggctccgcgcgcccgtctgcataaagaagatttccaggctgttgatatcgaagctatcgccaagccggtaagtaaaatggcggttacagtacgtgaagcggcgctggtgcctcgtgtgttgcaacaggcatttcacctgatgcgttctggtcgtccgggtccggtactggtggatttaccgttcgacgttcaggttgcggaaatcgagtttgatcctgatatgtacgaaccgctgccggtctacaaacctgctgccagccgtatgcagatcgaaaaagctgtagaaatgttaatccaggccgaacgtccggtgattgttgccgggggcggggtaattaatgctgacgcagctgcactgttacaacagtttgctgaactgaccagcgttccggtgatcccaacgctgatgggctggggctgtatcccggacgatcatgaactgatggccgggatggtgggtctgcaaaccgcgcatcgttacggtaacgcaacgttgctggcgtccgacatggtgtttggtatcggtaaccgttttgctaaccgtcataccggttcggtagagaaatacaccgaagggcgcaaaatcgttcatatcgatattgagccgacgcaaattggtcgcgtgctgtgtccggatctcggcattgtctctgatgctaaagcggcgctgacactgctggttgaagtggcgcaggagatgcaaaaagcgggtcgtctgccgtgtcgtaaagaatgggtcgccgactgccagcagcgcaaacgcactttgctgcgcaaaacccatttcgacaacgtgccggtgaaaccgcagcgcgtgtatgaagagatgaacaaagcctttggtcgcgatgtttgctatgtcaccaccattggtctgtcgcaaattgccgctgcgcaaatgctgcatgtctttaaagaccgccactggatcaactgtgggcaggcaggcccgctgggctggaccattccggcggcgctgggggtttgtgccgctgatccagagcgcaaagtggtggcgatttccggtgacttcgacttccagttcctgattgaagaattggccgttggcgcacagttcaacattccgtacatccatgtactggtcaataacgcttatctggggctgattcgccagtcgcagcgcgcgtttgatatggactactgcgtgcaactcgctttcgagaatatcaactccagtgaagtgaatggctacggtgttgaccacgtaaaagtagcggaaggtttaggttgtaaagcgattcgcgtcttcaaaccggaagatattgcgccagcctttgaacaggcgaaagccttaatggcgcaatatcgggtaccggtagtcgtggaagttattctcgagcgtgtgaccaatatttcgatgggcagcgaactggataacgtcatggaatttgaagatatcgccgataacgcagcggacgcaccgactgaaacctgcttcatgcactatgaataagggagataaataatgttacgtttctctgctaatttatcgatgttatttggagaatatgattttctcgcccgttttgagaaagctgcgcagtgtggttttcgcggcgttgaatttatgtttccttatgactacgacattgaagaattaaaacaggtgctggcgagtaataaactcgaacatacgctgcacaatttaccggcgggtgactgggcggcgggggagcgcggtattgcctgtattcctggccgtgaagaagagtttcgggatggcgtagcagcagcgattcgttatgcccgtgcgctgggtaataaaaaaattaactgtctggtcggtaaaacgccggctggtttcagcagtgaacagattcacgcaacgcttgtagaaaacctgcgttatgccgcgaatatgctgatgaaagaagatattttattactgattgaacctattaaccattttgatattcctggtttccatctcaccggaactcggcaggcgctgaaattgattgatgatgttggttgctgcaatttgaaaattcagtatgacatttatcacatgcagcggatggaaggtgaattaaccaacaccatgactcagtgggctgataaaattggtcacctgcaaattgccgataatccgcatcgcggcgaaccgggaaccggagaaattaattatgattatctctttaaggtaatcgaaaattctgactacaacggttgggttgggtgtgaatataaaccccaaaccaccacggaagccggtttacgctggatggatccgtaccgttaaaacgtaacgctattcagacaatgcttttttaggccgctaagttggcaggggatcgtgttgtctgaattcaggaaaagcgaaatttaaaagaggttaattatgaaactgggatttattggcttaggcattatgggtacaccgatggccattaatctggcgcgtgccggtcatcaattacatgtcacgaccattggaccggttgctgatgaattactgtcactgggtgccgtcagtgttgaaactgctcgccaggtaacggaagcatcggacatcatttttattatggtgccggacacacctcaggttgaagaagttctgttcggtgaaaatggttgtaccaaagcctcgctgaagggcaaaaccattgttgatatgagctccatttccccgattgaaactaagcgtttcgctcgtcaggtgaatgaactgggcggcgattatctcgatgcgccagtctccggcggtgaaatcggtgcgcgtgaagggacgttgtcgattatggttggcggtgatgaagcggtatttgaacgtgttaaaccgctgtttgaactgctcggtaaaaatatcaccctcgtgggcggtaacggcgacggtcaaacctgcaaagtggcaaatcagattattgtggcgctcaatattgaagcggtttctgaagccctgctatttgcttcaaaagccggtgcggacccggtacgtgtgcgccaggcgctgatgggcggctttgcttcctcacgtattctggaagttcatggcgagcgtatgattaaacgcacctttaatccgggcttcaaaatcgctctgcaccagaaagatctcaacctggcactgcaaagtgcgaaagcacttgcgctgaacctgccaaacactgcgacctgccaggagttatttaatacctgtgcggcaaacggtggcagccagttggatcactctgcgttagtgcaggcgctggaattaatggctaaccataaactggcctgatacccgcaataaaaatggccgatatcagaaaatgaatcggccagcaatattaaaaaagaaagcagccaaagatgttgcttcagtattaaaaataatatttttattttatttgttcctcatagctagattaaaacaacgttattcgatacgtgaaattaagagggatttatggaacatcagagaaaactattccagcaacgcggctatagcgaagatctattgccgaaaacgcaaagccagcggacctggaaaacatttaactattttaccttatggatgggttcggttcataacgttcccaattatgtgatggtcggcggcttttttattctcggcttgtctacctttagtattatgctggcaattatcctcagcgcctttttcattgccgcggtaatggtattaaacggcgctgcgggcagtaaatacggcgtaccgtttgccatgatcctgcgtgcttcttacggcgtacgtggcgcactgtttcccggattattaagaggcggtattgctgccattatgtggtttggcctgcaatgttacgcggggtcactggcctgcttgattctgattggcaaaatctggccgggatttttaactctcggtggtgatttcacgctgttagggctttctctaccgggcttaattactttcttactcttctggctggtcaacgttggtataggttttggcggtggcaaagttttaaataaattcactgccattcttaacccgtgcatctatatcgttttcggcggcatggcgatttgggcgatttcactggtcgggatcggtccaatctttgactacattccgagcggtattcagaaagcagaaaacagtggattcttgttcctggtggtgattaacgcggtagttgcggtctgggcggcaccggcggtgagcgcatccgactttacgcaaaacgcccactcgtttcgtgagcaggcgctggggcaaacgctgggtttagttgtggcctatattctgtttgcggtcgccggggtatgtattattgccggagccagtattcactacggcgctgatacctggaacgtgctggatattgttcagcgttgggacagcctgttcgcctcgttctttgcggtactggttattctgatgacgactatttccactaacgccaccggtaatattattccagccggttatcagattgccgccattgcaccgacaaaactgacctataaaaacggcgtactgattgccagtattatcagcttgctgatctgcccgtggaaattaatggaaaatcaggacagcatttatcttttcctcgatattatcggcggaatgcttggtccggtaattggtgtcatgatggcgcattattttgtggtgatgcgcggacaaattaatcttgatgaactgtataccgcacctggcgattataaatattacgataacggttttaacctcactgcgttttcagtaactctggtggccgttattttatctcttggcggtaagtttattcactttatggaaccgttatcgcgtgtttcatggtttgtcggcgtcatcgtcgcctttgcggcctacgccttattaaagaaacgtacaacagcagaaaaaacaggagagcaaaaaaccataggttaattaatcccgatattgaacattgagttaaaaaccaatctgtattttacaaggagtttgttatgtcttttgatttaatcattaaaaacggcaccgttattttagaaaacgaagctcgcgttgtagatatcgccgttaaaggcgggaaaattgctgctatcggtcaggatctgggcgatgcaaaagaagttatggatgcgtctggtctggtggtttcgccgggcatggttgatgcgcacacccatatttctgaaccgggtcgtagccactgggaaggttatgaaaccggtactcgcgcagcggcaaaaggtggtatcaccaccatgatcgaaatgccgctcaaccagctgcctgcaacggttgaccgcgcttcaattgaactgaagttcgatgccgctaaaggcaagctgactatcgatgcggcacaactcggtggcctggtgtcttacaacatcgaccgtctgcatgagctggatgaagtgggcgttgtcggcttcaaatgcttcgttgcgacctgtggcgatcgcggtatcgacaacgacttccgtgatgtaaacgactggcagttcttcaaaggtgcgcagaagctgggcgaactggggcagccggtgctggtgcactgcgaaaacgcgctgatctgtgacgcactgggcgaagaagcgaaacgtgaaggtcgcgtaactgcccatgactatgtggcttcgcgtccggtatttaccgaagtggaagcgattcgccgcgtgctgtatctggcgaaagttgccggttgccgtctgcacgtttgccatatcagcagcccggaaggcgttgaagaagtgactcgtgcacgtcaggaaggtcaggacgttacttgtgaatcctgcccgcattactttgtactggataccgatcagttcgaagaaatcggcactctggcgaagtgttcaccgccgatccgcgatctggaaaaccagaaaggcatgtgggaaaaactgtttaacggtgaaatcgactgcctggtttccgaccactcaccatgccctccggaaatgaaagccggcaacatcatggaagcatggggcggtattgccggtctgcaaaactgtatggacgtgatgttcgatgaagcggtacagaaacgcggaatgtctctgccaatgttcggcaaattaatggcgactaacgcagcagatattttcggtctgcagcaaaaaggccgtatcgccccaggaaaagatgccgacttcgtcttcattcagccgaatagcagctatgttcttaccaatgacgatctggaatatcgccacaaagtcagcccgtatgttggccgtaccattggcgcgcgtatcacgaaaaccatcttacgtggtgatgtgatttacgacattgaacagggcttccctgttgcgccgaaaggtcaatttatccttaaacatcagcagtaatctggcccctgcaatgcccgtccttgcggcgggcattctccggttaaggtgtgtttatgttcaattttgcagtgagccgcgaaagcctgttatcaggatttcagtggtttttctttattttttgcaacacggttgtggttcctcctacgctactttctgcttttcagttgccgcaaagtagcctgcttacgctcacgcaatatgcttttcttgctaccgcactggcctgcttcgctcaggcgttctgcggtcatcgtcgcgctattatggaagggccgggtggcctgtggtggggaaccatccttactatcacccttggcgaagcatcgcgcgggacaccgatcaacgatatcgctaccagcctggcggtggggattgcgctctccggcgtgctgacgatgttgattggttttagcggattaggccatcgcctggcacggttatttacgccgtcggtgatggtcttgtttatgttgatgctgggcgcgcagctgaccactatctttttcaaaggtatgctcgggctgccgtttggcatagccgacccaaattttaaaattcagttaccgccgttcgcgctctcggtggcggtgatgtgcctggtactggggatgattatcttcctgccgcaacgttttgcccgttatggcctgctggtcggcaccataaccggctggttgttgtggtacttttgctttccttcttcgcactcgctctccggtgagttgcactggcagtggttcccgctcggcagtggaggtgctttgtctccgggaattattctgacggcggtgattacaggtctggtgaatatcagcaatacctacggtgcgattcggggcacggatgttttttatccgcagcagggcgcggggaatacgcgttatcgtcgcagctttgtggcgaccggatttatgacgctgataaccgtaccgctggcggtaattccattttcaccgtttgtttcatccattggtttattaacccagactggcgattacacgcggcgttcatttatttatggcagcgttatttgccttctggtggcgctggttccggcactcacacgactgttttgcagtatccctttacccgtgagtagtgcggtcatgctggtttcttatctgcctttactcttttccgcgctggtgtttagccagcaaataacgtttaccgctcgcaatatttatcgactcgcattgccgttatttgtcggcatatttttaatggcattaccgcctgtgtatctgcaagaccttccattaacgctgcgtcctctgctcagtaacggcttactggtcgggattttactggctgttcttatggataatcttattccgtgggaacgcatcgaataatttgttgaaaaaggattgataatgaagattgtcattgcgccagactcttttaaagagagcttaagtgcagaaaaatgttgtcaggcaattaaagccgggttttcgaccctctttcccgatgcgaactatatctgtttgccgatagcggatggcggcgaagggacggtggatgcgatggtcgccgcgacgggcggcaacatcgtgacgcttgaagtctgcgggccgatgggcgaaaaagtgaatgctttttatggccttaccggcgacgggaaaacggcggtgattgagatggcggcagcaagtggcctgatgctggtcgcgcctgaaaagcgtaatccgttgctggcctccagttttggtacgggggagttaattcgtcatgcgctggataacggcattcgccatattattctcggcattggcggcagtgcgacggtcgacggtggtatgggcatggcgcaggcgctcggtgtgcgtttccttgatgccgacggtcaggtgctggtggctaacggcggtaatttagcgcgcgtggcaagcattgagatggatgaatgcgatccgcgtctggcgaattgccatattgaagtagcatgtgacgttgataacccgctggtaggggcacgcggcgcggcggcggtgtttggcccgcaaaaaggggcaacgccggaaatggtcgaagagctggaacaggggctgcaaaattacgcccgtgttttacaacagcaaactgaaatcaacgtctgccagatggcgggcggcggcgctgcgggcggtatgggtattgcggcggcggtatttctcaatgcggatattaaaccaggtattgagattgtgttgaatgcggtcaatcttgcgcaggcagtgcagggcgcagcactggtgattaccggggaagggcgcatcgactcgcaaacggcaggcggtaaagcgccgctgggtgtggcgtcggtggcgaagcagtttaatgtaccggtgattgggattgctggcgtattgggtgatggcgtggaagtggtgcaccagtacggcattgatgcggtattcagcattttgccacgtctggcacctttagccgaagtgctcgccagcggtgaaaccaatctcttcaacagcgcacgaaatattgcctgcgccattaaaataggtcagggaattaaaaactgacccttacctttaaagcggatgcgatttatatcgcatctttttttacctgaatttactacaaaaaaagccacggtataaaccgtggcaaaatccaacatagctaaaaataatcaggcgagtggtatgacttaaatctcgacgtcgcggttacaatctttcgagtaaatatagctgaacgcttcaccacgccctacgccataaccagcctgtaaagaataagcgcccataaagatgtaatcgccttttttcaccgggatccagttattgtcgaggttataaaccccctgaccggaaagaatataggcaccgtgttcctgaacatgtgtttcgatataaccgtggctggcacctggtgcaaaagagaggatatgcatgttcatatcaaaacctaactctttgggcagaaaatccagcaggatcacatcatccataccttcatagtgaatgcgttccagttcgctggcattgccagaaaccagccacggtgcatggccttctaccggaacatagcggcgcttatataaaaagatttggctgtcttcggcctgggcgttaacaaacgtcattaaggagcctggtgggcaataaagatagccaccttcgcttaaggcaaatgttttgccttcggctttggcagtgatatttccagagatcacatacaggaacgtttcaatgccttcgccaccgaagccctgttggttgccaccgttttgatgcagtgtgaccagataatcaacaaaagaggcacccagctttggcgtggagaggattgtcgcgtcacaattttcaaagcccggaataatattttttaccagaccatccggggttaacagtgcgaaattaccgtgtttaacaatcgcacggttagccagtaaatcatcgcggtaaccggtgacgttatttaaatatcccatttatgactccttatttctgccaggcaagttgataaagcatgagtgccaacgttttgaccccttcggcaaggtcggtaatattggtgcgttccgccgggttatggctgatcccgttgatgctgggaatgaaaatcatgcaggttggtacgcgaggcgcgaaaatttgcgcgtcgtgcccggcaccactgtgcatcacccggtaattcagtttttcactttcacacaattctgtcagggtggcgaccagctccttattcatcggcacgggttcttcgtccatccataaatcgatatcaataccaatgtccatttcatcgcaaatcgcccgcatgtcgttttctaactgttgggtgaaatcgcgcagcacggcagcgtcggtatgacgacaatcaatggtgaacgtggttttacccggcaccacatttaccgtattcgggcgcggctctactttgccaaaggtcagaaccagcggatcgcccatccttttcgctttttcgaccgactgatggcaaatgcgactgaaagcgtaaactgtatcacgacgataacccatcggcgtggtgcctgcatggtttgattcgccgttcagcgttaccgtataacgacgctgcccgacaattgcattcaccacgccaattgattgcccattactttccagcacacagccctgttcaatatgcagttcaacaaaggctttaatatcctgacgcggagttagtggggcgttcggaagagtaaatccgcaagccttcatcgcatcgacaaaactatttcctttggcatcacagatattccgcacgtcgtcaggattcgccagcccaaagatatttttactgccccagaagacatacgggaagcggctgccttcttcttctgccatcgccaccacttcgaccgtacgtagcggcgcgccgtattgcgttttcagccagtcaattgccagccacgccgccagcgcgccgaattgcccgtcgaggttaccgccgttaaccacggtatcgatatgcgaaccgctcagaatcacttcctgtggatattcggtaccattcaggcgaccgtataaattccctacttcatcgaaacgtgtttccagcccacttgctgccattctttttttaaattgctgctgggtttccagccattccggcgaataaagtaaacgggtcatcccacccgttgggtcagcgccaaaagaggaaagccagggtagcgtttcttctatggcttgacggaaatgtgtaatcataagaaagtcctgtctcaataattattgcgcaaagggatttttcgtttcgtatgacgtgttataaagcgcgtcggaaattaaatactggtaaatatcatcaacaatttcgatgccttcgacggcggctttgcgttgtttaatatcctgatcctgtccgggataataaacctgattaaaaccgggcgcgggggtaatggcatttaattcgcgcatggtctggctaagatgttgacggaataattcgctggaggagaaaaagttcggattaataactatatgtaattgccccaaattacgcccggcgtgtaaatcgtcatacatcgaactaacctgtcgcccgaacggtaagccgagtaagacgcctgagaggacgtcaatcatcatcatcaggccataccctttcggcccggcggcggggagcagagcatgtaccgcgagcggatcggttgttggtgctccgtttttatcgaccgcccaggtatccgggatagacatattacgcgagcgggcgtcgagcacttttccccatgcctgtacggtagtcgccatatcaaaggtaaggatctcgtcgccttctcccggcgcggcaaaggccagtgggttagtaccgtagtaaatttccgcgccgccaaacggcaccaccattggatcggactggcacatcgaaatgccaattaatccggcgcgggctgcctgctgcacaaaataagagattgcgccgctgtgacccatccggctgattccgaccaccgcaacgccattttgctcggcggttttgatggcatgttccatacccattttcgccgcgacctgtccggcggcattgtcggcatgtaaaattgccgagcacggcccggtttcctcaagacgaaactccggttcgcggttggtgccgccttttgaaatgcgttccgcgtagtattccacgcgcaccgcgccatgagagtggatccctctggcatcggcgtaaaccaatacttcagccacggttgcagcgtgctcacgttttaacccagcctggcagagtttattctcgattagctggtggagtgtttcccgactgattttcatctgtcttcctttttaacgacggtgtgaagcatgactgcaattaacatacagggaaaatatctggattatgtgatccagacaggcaaaaaaatatagttagaatttatttgataatccgctcacttttaacctgatttttaaaacaaccacgcttattaaaaaataatgcgtaatagcctggcggttatttgaattcttttgttaataatccctgtgtgatattcatcaccttatttacccgttgtcatcgataccgtaatcgccacattaacactgctcgtgcaattgccatgggtgcaatttttaaggagttgttatgatccacgcctttattaaaaaagggtgttttcaggattcggtcagtttaatgattatttcacgaaaactcagcgaatcagaaaatgttgatgatgtttccgtaatgatgggtacgcccgccaataaagcgttattagataccacagatttctggcatgacgattttaataacgccacgccgaacgatatttgcgtggcaattcgtagcgaagcggcggatgcggggatcgcgcaggcgattatgcagcagcttgaagaggcgctaaaacaactggcgcaggggtcaggcagcagcctggcgttgacgcaggtgcgtcgctgggacagcgcctgtcagaaattacccgatgccaatctggcgctgatttcagtggctggcgagtatgcggcggagctggcaaaccaggcgctggatcgcaacctcaacgtgatgatgttctccgataacgtcacgctggaagatgaaatccaacttaaaacccgcgcgcgggaaaaaggcttgctggtgatggggccggactgcggtacgtcgatgattgccggcacaccgctggcttttgctaacgtgatgccggaaggcaatattggcgtcattggcgcttccggtaccgggattcaggagctgtgttcgcagattgcgctggcaggggagggaattactcacgcgattggccttggcgggcgcgatctcagccgtgaagtgggcggcatcagtgcgctaacggcgctggaaatgttgagtgcagacgagaaaagcgaagtgctggcatttgtttcaaaaccacctgccgaagctgtgcgtctgaaaattgttaatgccatgaaagcaaccggcaaaccgacggtggcgctgtttttaggttataccccggcagtggcccgcgacgagaatgtctggtttgcctcctcgctggatgaggccgcacgcctggcttgcctgctttcacgcgttacggcgcgacgtaacgcaatagcgcctgtcagcagcggatttatttgcggtttgtataccggcggtacgctggctgccgaagcggcgggattacttgccggacaccttggcgtggaagccgacgatacccatcatcacggcatgatgctcgacgccgatggtcaccagattattgacctcggcgatgatttctacaccgtcgggcgtccccatccgatgatcgacccagccttacgcaaccagttaattgccgatctcggcgctaaaccgcaagtgcgcgtattgctgcttgatgtcgtgattggcttcggtgcgaccgccgatcctgccgcctcgctggtaagcgcttggcaaaaagcctgtgccgcgcgttcagacaatcaaccactgtatgccattgccacggtgacaggcactgaacgtgacccgcaatgccgctcgcagcaaatcgccacgctggaagatgcggggatcgcggtagtgagttcgctgccggaagccaccttgctggcggcggcactgattcgtccgctttcgcctgccactcagcaacacacaccgtcattaatggaaaacgtcgccgtgattaacatcggattgcgcagctttgcgctggagctacaaagcgccagcaaaccggttgtgcattaccaatggtcgccagtcgccggcggcaataaaaaactggctcgtttattagaacgtttgcaataaggggttcccatgtttacatcagtggcgcaagccaatgctgcggttatcgaacaaattcgtcgcgctcgtccacactggctggatgtgcaaccggcttcttcacttatcagcgaactaaacccgggcaaaacactgcttcacgccgggccgccaatgcgctggcaggagatgaccggacccatgaaaggggcgtgcgtgggcgcatgtctgttcgaaggttgggcgaaagatgaagcgcaggcgctggcaattctggagcagggggaagtgaacttcattccttgtcaccatgtgaatgccgtcgggccaatgggcggtattacttctgccagtatgccgatgctggtggtcgagaacgtgaccgacggcaaccgggcgtactgcaacctcaacgaaggtatcggcaaagtgatgcgttttggcgcttacggcgaagatgtcctgactcgccatcgctggatgcgcgatgtgttaatgccagtattaagcgcggcgctggggcgcatggagcacggtatcgatctcacggcgatgatggcgcagggcattaccatgggcgatgagttccatcaacgcaatattgcttcctcagcactgttaatgcgtgcgctggccccacaaattgctcgcctcgatcatgataaacagcacatcgcggaagtgatggatttcctcagcgtgaccgatcagttcttcctcaaccttgcgatggcttactgcaaggcggcgatggatgctggcgcgatgatccgcgcaggcagcatcgtcacggcaatgacccgcaacggcaatatgttcgggattcgggtaagcgggctgggcgaacgctggtttactgcgcctgtaaacactccgcaaggtctgtttttcaccggcttctcgcaggagcaggcgaacccggatatgggcgatagcgcgattaccgaaacctttggtattggaggtgcggcaatgatcgcagcgcctggcgtaacgcgctttgtcggtgcgggtggcatggaagcggccagagcggtatctgaagagatggcggaaatttaccttgagcgcaatatgcagttgcagatcccaggctgggattttcagggcgcgtgcctgggactggacattcgtcgcgtggtagaaaccggcattacgccactcatcaataccggtatcgcccataaagaggcggggatcgggcagattggcgcaggcactgtgcgggcaccgctggcgtgttttgaacaggcgctggaagcactggctgaaagcatggggattggttgaggaacgcgcaatgacgatcatccatcctctgcttgccagccgtagtgcaccgaattatcgccagtcctggcggttagcgggagtgtggcgacgggcgattaacctgatgacggaaagcggcgaactgttaacgctgcatcgtcagggtagtggtttcggccccggaggatggatgcttcgccgtgcgcaattcgatgcgttatgcggtggattatgcggcaatgaacgaccacaggttgtggctcaagggattcgcctcgggcgtttcacggttaaacagccacagcgttattgtttgctgcgtattacgccgcctgcgcatcctcaaccacttgcagctgcatggatgcaacgcgcggaggaaaccgggcttttcgggccactggcgttggcggcaagcgatccgctgcctgctgagttacgccagtttcgtcactgttttcaggccgcgctcaatggcgttaagaccgactggcggcactggctgggtaaaggccccggattaacgccgagtcatgatgacacgctgagcggaatgctgctggcggcctggtattatggcgctttagatgcgcgctccggtcgccagttttttgcctgttccgacaatctgcaactcgttaccacagcggtgagcgtcagttatttacgttatgccgcgcaaggatatttcgcctcgccactcctgcactttgttcatgctctgagttgcccgaaacgtaccgctgttgcgattgattcgctgctggcgctggggcatacgtcaggggcagatacactgctggggttctggcttggtcaacaattattacaaggaaaaccatgaaaacactggttgtagctcttgggggcaacgccttactccagcgcggtgaggcgctgacggcggaaaatcaatatcgcaatatcgccagtgctgtacccgcgctggcacgcctggcccgttcttatcggctggcgattgttcacggcaacgggccgcaggtggggctgctggcattgcagaatctggcgtggaaagaggtagaaccgtatccgctggatgtgctggtggcagaaagtcaggggatgattggctatatgctggcgcagagtttgagcgcacagccgcagatgccgcccgtgacgacggtgctgacgcgcattgaggtttcgcctgatgatccggcgtttttgcagccagagaaatttattggtccggtttatcagccagaagaacaagaggcactggaagcggcttacggctggcagatgaaacgtgatggtaaatatttgcgccgggtggtggcgtctccgcaaccgcgtaaaattctcgacagcgaagccatcgagttgttgctcaaagaggggcatgtggtgatttgcagtggcggcggcggtgtgcctgtgacggaagatggggcagggagtgaagcggtgattgataaagatctcgctgctgcgttgctcgctgagcagattaacgccgatgggctggtgatcctcactgatgctgatgcggtatatgaaaactggggaacgccgcagcaacgcgccattcgccatgccacaccggatgagttagcgccatttgccaaagccgatggttcgatggggccgaaggtaacggcggtgagtggttatgtcagaagccgtggtaaacccgcgtggattggggcgttatcgcgaattgaagagacgctggcgggcgaagcggggacctgtatttcgctgtagtcgtaggcattagacatttgtgcctgatgcgacgcttgacgcgtcttatcaggcctacaaccggtgccgcatccggcaattggtgcacaatgcctgatgcgatgcttgacgcatcttatcaggcctacaatgggtaccggatcggtaggccggataaggcgtttacgccgcatccggcaagaatagagcaccagttaaccgaacttactctgcgcccaaatcacgccgctggcatattccggcggcagcagcgggattaaggcttccagcgtcgcagtcagacgcgatgtgtcgctgtcggtcaaattcagatgccccactttacgccccggacggacttctttgtcgtaccagtgcagatgcaccagcggcagtttcagccagtcataattcacatcgctaccaatcaggttgatcatcaccgacggactattcactaccggttgcggtaacggcagatcggtaatcgcccgcagatgcagctcaaactggctgatgctggcaccgttttgtgtccagtgaccgctgttatgcacacgcggtgccagttcgttgatcagcagaccttgcggggtgacaaaacactccatcgccatcacgcccacatagcccagctcctgcataatcgccgacagcatctcttcggcttgcgcttgctgctgcgcattggcctgcggaaaagcgacgctggtgcgcaaaataccgtcctgatgcaggttatgcgtcagcggataaaacacggtgctgccatcaaatccgcgtgcgccaaccagcgacacttcaccagagaagttaatgccctgctcgacaatacattcgccgtaacactctgccggtaactgttcggtttcattggcacgtaaacgccattgaccgcgaccgtcatagccaccagtgcgacgcttaacaatcgccagttcacctaaacgctcaaacaccgcaggccactcgctgcgatcggcaagtaactgccacggtgcggtcggcaggtggagcttatcgaaaagctgcttctgagtcagacggtcggcaataatcgggaacacatcgcggttcacaaaggccggatgacgcgccagctcgcgggttaatgcggtttccggccagcgttcgatctcagcggtaatcacgctttgttgaaaaggcaccgccgccggttcagcgtccagcccgaccggccagacagcaatgcctaacggttcgcctgcctgacgcagcatacggcctaactgcccgttaccgaggacgcaaacctgtttcatgccgcacctcgcgggtccgggttttccagcacttcgtcggtctgggctttgcgccagtcattcagacgctggtgtagctctttatcgtgagtcgcgagaatttgtgctgccagtaatgccgcgtttgccgcgccagctttaccaatcgccagcgtacccaccggaatgccgcgcggcatttgtacgatggagtagaggctatcgacaccgctcagtgcggcgctctgtactggcacgcccagcaccggcaccagcgttttggcggcaatcatgcctggcaggtgcgctgcgccacctgcgcccgcaataatcacctgataaccgttctcttcggcgctttcggcgaagctgaacagtttatcgggggtgcggtgagcagaaaccacttcaacgtggtgcgggacattcaggatttcgaagatttcggcggcgaactgcatggtagcccagtcgcttttggaccccatcacgatggcgacacgcgccggattattgcgggaagacatgcgtcttaaaactcctgtggtgcacaactctcggctttagagggcacagagaatagcacggaaagagagcaaggaaaacggttgcgtggctgtgaaatcagcaaagttgtgggttttttaaaacggaaaatgaatcagctcaacgtcatccgccgtgactttcaccatcgaaccttccgtatgccaggcaccgagtaccacgcgaaaagcaggttgctggttggcgataagttcatgtaccgccgggcgatgggtatgtccgtggatcagccattgcacctgatgtttttccatcgcactgactaccgcgttttggttaacgtccatgatcgccagcgatttactgctgttggcttctttactgttcgctcgcattcgcgcggcaatgcgtttgcgcacaaacaacggcagggcgaggaatagcatttgcagccagggtttgtggactttggcgcgaaaagcctgataacccgcgtcatcggtgcacagcgtgtcgccatgcataatcaacacccggcgaccataaagttcgagcaccttttcttccggcaataatgtcatgccgctttcacgggcaaagcgtttgccgagcagaaaatcacggttgccatgaatgaaataacagggaacgccggaatcggacaccgctttgatcgctgccgccatctggcgatggagtgggttgggatcgtcgtcgccaatccatgcttcaaacagatcgccaagaatatacagcgcgtcggccttgcgggcttcccccgctaaaaaacgcagaaaaccggcggtgatcgccggttcttccacgcagagatgaagatctgcaataaagagtgtcgccacgattactcgctaacggtcacgctttcaatgataacgtcttcttttggcacgtcctggtgcataccgctacgaccggttgcaacacctttgattttgtctaccacgtccatgccgtcaaccacttcagcaaacacgcagtagccccaaccttgcaggctttcgccagagaagttcaggaagtcgttatcaaccacgttgatgaagaactgtgcagttgcagagtgcggagcctgagtacgtgccattgccagcgtaccacgggtatttttcaggccgttgttggcttcgtttttgatcggttctttggtggctttttgtttcatgcccggttcaaaaccgccgccctgaatcataaagccgttgataacacggtggaaaatggtgttgttgtaaaaaccttcgcggcagtagtccaggaagtttttaactgtttcaggtgctttatcgtcaaaagttttgatgacaatatcgccgtgattggtgtggaaagtaaccatttttgcatcctgttccgtttgattggtgcttcaacccagttcgggtcatatatagggtggtgttatagcataaccgcacgatcggatcatcacgcaatgtatgctgattcgcgcgggaaatatgggtattatacgcaactcaattacccacacatgtctaaacggaatcttcgatgctaaaaatcttcaatactctgacacgccaaaaagaggaatttaagcctattcacgccggggaagtcggcatgtatgtgtgtggaatcaccgtttacgatctctgtcatatcggtcacgggcgtacctttgttgcttttgacgtggttgcgcgctatctgcgtttcctcggctataaactgaagtatgtgcgcaacattaccgatatcgacgacaaaatcatcaaacgcgccaatgaaaatggcgaaagctttgtggcgctggtggatcgcatgatcgccgaaatgcacaaagattttgatgctttgaacattctgcgcccggatatggagccgcgcgcgacgcaccatatcgcagaaattattgaactcactgaacaactgatcgccaaaggtcacgcttatgtggcggacaacggcgacgtgatgttcgacgtcccgaccgatccgacatatggcgtgctgtcgcgtcaggatctcgaccagctgcaggcaggtgcgcgcgttgacgtggtcgacgacaaacgcaacccgatggacttcgttctgtggaagatgtcgaaagagggcgaaccgagctggccgtctccgtggggcgcgggccgtccaggctggcacattgaatgttcggcaatgaactgcaagcagctgggtaaccactttgatatccacggcggcggttcagacctgatgttcccgcaccacgagaacgaaatcgcgcagtccacctgtgcccatgatggccagtatgtgaactactggatgcactcggggatggtgatggttgaccgcgagaagatgtccaaatcgctgggtaacttctttaccgtgcgcgatgtgctgaaatactacgacgcggaaaccgtgcgttacttcctgatgtcgggccactatcgcagccagttgaactacagcgaagagaacctgaagcaggcgcgtgcggcgctggagcgtctctacactgcgctgcgcggcacagataaaaccgttgcgcctgccggtggcgaagcgtttgaagcgcgctttattgaagcgatggacgacgatttcaacaccccggaagcctattccgtactgtttgatatggcgcgtgaagtaaaccgtctgaaagcagaagatatggcagcggcgaatgcaatggcatctcacctgcgtaaactttccgctgtattgggcctgctggagcaagaaccggaagcgttcctgcaaagcggcgcgcaggcagacgacagcgaagtggctgagattgaagcgttaattcaacagcgtctggatgcccgtaaagcgaaagactgggcggcggcagatgcggcgcgtgaccgtcttaacgagatggggatcgtgctggaagatggcccgcaagggaccacctggcgtcgtaagtaattgcgctgttgccggatgcgagttttcgcatccggttatcgcctgcgccaccacaacattcccataagcaccatccccggcaaccacacccacatcaattcagaaattatcacctgatgcccgtacggcgtggtgtaacgagacaatgcaaacggcgcgactttaatcacctgccagggagcgaaaaagcgttcatctgaccacggccacagccagccaacgcccttaccgccagtggttaccgaatccagcaagctgtgcgatagcaacgagacggttaaaaacagccagcagcaaatcagcccagccctgaaccatcggcgtccaatcagcacacataacagcgggacaacaaacgcaaacaccagcgaatgggtaaaaccgcgatgaccaaaaacattgccgtaagcaacgccaaatttaaacgacaatacgtcggcgtcgggcagcatcgccaggatgattccggcaaataacagacgcggagggatgactttcgaacccaaccctaaaccaatgcataggggaacggcggcgtgcgtaataacggttggcatgatggtcgcttcggcaaaatgtcgatgctatcagcatggatgaacggggcgtagagggcaaaagtctgaaaagagaaccggcctgttgatacaggccgggaaagggatcaggcaacaacctgtacgctgtgacctgcaaaactcactgtttgaccggcgacgattttgcagcgtttgcgcgtttcaaccgcaccgtcgactttcacctggccttcggcaatcgcgattttcgcctgcgcgccgctttcgctccagccttccagtttcagcaagtcgcacagctcaacgtgcggatgtttacctaaagaaaatgtcgccatgttactcatcctgtggatcatgatattcaacgcacgcctgtagcgtgttttcaatcagcgtggcaaccgtcatcgggccaacgccgccgggaacaggcgtaatgtatgaggcgcgtttagccgcgtcttcaaacacgacgtcgcccacaactttgccattttccagacggttgatgccgacatcaatcacaattgcgccttctttgatccagtcaccgggaataaagcctggcttgccaacggcaacgatcaacagatcggcattttctacgtgatgacgcagatttttagtgaagcggtgagtcacggtagtggtgcaacctgcgagcaacagttccatgctcattgggcgaccgacgatattcgatgcgccaatcaccacggcgttgaggccgaaggtatcaatgttgtaacgctcaagcagcgtgacgataccgcgcggggtgcagggacgcagacgcggcgcgcgctggcacagacgaccgacgttgtaaggatggaaaccgtccacgtctttgtccggatgaatacgttccagcactttgacgttatcaatacccgccggtaacggcagttgaaccagaatgccatcgatggtgttgtcggcattcagcgcatcgataagctccaacagctccgcttcgctggtggtttccgggaggtcataagagcgggagacgaacccgacttcttcacaagccttgcgtttgcttgcgacataaatttgcgatgcagggttactacccaccagcacaacggccagtcctggtgcccgcagtccggctgcaatacgcgcctgaactttttgagcaacttcagagcgcacctgctgcgcaatcgttttaccgtcaataatctttgctgccatcagagagaggattccatctgttacgtaggtcgaaggggatgcgcctattttgtcagaagcggggcgcgctgtcaggtttcgtttcagatttatcgcgtgaagcgacctcttgcgaaggttaggcgcaccgtcgctgaggtcgctgagattgaaagcttcatttttcgtccatgatggcgttgtaaatctggaactgatttatttccttgtttaaggattaagataatttaagaaatacctgacaatataaaaagaattttcagcctggtgatttaccgcttcaggtctatatttgtgttgaatatattttgcgcggaagtattcatctaacggggctctctattttttagattagagtgcatattttcaattaagacattcttagaggataaaaaggaattttactactatcagtgacttaaataaagtaatcggttatatacggatgtggagtcgataaatgagattgaaggaatatatatgaaattaagatttatttcgtctgcgctggctgccgcactattcgccgctacgggtagttatgctgccgttgtagatggcggtacaattcactttgaaggcgaactggtgaatgctgcctgttcagtgaatactgactcggcagaccaggttgtcacactcggtcaatatcgtaccgatattttcaatgctgttggtaatacctctgcattaattccattcaccattcagttgaacgactgcgatcctgttgttgccgctaatgctgccgttgcattttctggtcaggctgatgcaatcaatgataatttattggccattgcatccagtaccaatacaacaacagcaacgggtgtcggtattgaaatacttgataatacatccgcaattctcaaacctgatgggaatagcttctcaaccaaccagaacttgatccccgggaccaacgttcttcatttttctgcacgttataaaggcaccggtacaagtgcatcagcagggcaagcaaatgctgacgcgacttttattatgagatacgaataatcaaaaccacgttgttttgaattatatatcacgtcttataacaaagtaatgtgccggttgtctgaagcggtatggtggcaatgtaaatcgaaatcatgttcactttgtatcatgccgctttattaaatgaaaagggaatgatgtgttgtaagaaaccaaagcaatcatttctttatatttcttatttttgccgtcaggaatacacaaggcgtattaactatgatgactaaaataaagttattgatgctcattatattttatttaatcatttcggccagcgcccatgctgccggagggatcgcattaggtgccacgcgtattatttatcccgctgatgctaaacagactgcggtatggattagaaatagccataccaatgagcgttttctggtcaattcgtggattgaaaacagcagcggtgtaaaagaaaagtcattcatcattacaccgccactgtttgttagtgaacccaaaagcgaaaatactttgcgtattatttacaccggtccaccgctggcagcagatcgtgagtctctgttctggatgaatgttaagacgatcccttcggtagataaaaatgcattgaacggcaggaatgttttgcaactggcgattttatcgcgcatgaaattatttctccgtccaattcaattacaagaattacccgcagaagcgccggacacactcaagttttcgcgatccggtaactatatcaatgttcataatccatcacctttttatgtcaccctcgttaacctgcaagtgggcagccaaaagttggggaatgctatggcggcacccagagttagttcacaaattcccttaccctcaggagtgcagggaaagctgaaatttcagaccgttaatgattatggttcagtaaccccggtcagagaagtgaacttaaactaaccgaatcatctgacaatatcagagctaattatgaaaatacccactactacggatattccgcagaggtatacctggtgtctggccggaatttgttattcatctcttgccattttaccctcctttttaagctatgcggaaagttatttcaacccggcatttttattagagaatggcacatccgttgctgatttatcgcgctttgagagaggtaatcatcaacctgcgggcgtgtatcgggtggatctctggcgtaatgatgagttcattggttcacaggatatcgtatttgaatcgacaacagaaaatacaggtgataaatcaggtgggttaatgccctgttttaaccaggtactccttgaacgaattggccttaatagcagtgcatttcccgagttagcccagcagcaaaacaataaatgcatcaatttactgaaagctgtacctgatgccacaattaactttgattttgcagcgatgcgcctgaacatcactattcctcagatagcgttgttgagtagcgctcacggttacattccgcctgaagagtgggatgaaggtattcctgctttactcctgaattataatttcaccggtaacagaggtaatggtaacgatagctatttttttagtgagctcagcgggattaatattggcccgtggcgtttacgcaacaatggttcctggaactattttcgcggaaatggatatcattcagagcagtggaataatattggcacctgggtacagcgcgccattattccgctgaaaagtgaactggtaatgggagacggcaatacaggaagtgatattttcgatggtgttggatttcgtggtatacggctttactcttccgataatatgtatcctgatagccagcaagggtttgccccaacggtacgtgggattgcccgtacggcggcccagctaacgattcggcaaaatggtttgattatctatcaaagctatgtttcccccggcgcttttgaaattacagatttgcacccgacatcttcaaatggcgatctggatgtcaccatcgacgagcgcgatggcaatcagcagaattacacaattccgtattcaacagtgccgattttacaacgcgaagggcgtttcaaatttgacctgacggcgggcgattttcgtagcggtaatagtcagcaatcatcacctttcttttttcagggcacggcactcggcggtttaccacaggaatttactgcctacggcgggacgcaattatctgccaattacaccgcctttttattaggactggggcgcaatctcggaaactggggggcagtgtcgctggatgtgacccatgcgcgcagtcagttagccgacgacagtcgtcatgagggggattccattcgcttcctctatgcgaaatcgatgaacaccttcggcaccaattttcagttaatgggttaccgctattcgacacaaggtttttatacccttgatgatgttgcgtatcgtcgaatggaggggtacgaatatgattacgattacgacggtgagcatcgggatgaaccgataatcgtgaattaccacaatttacgctttagccgtaaagaccgtttgcagttaaatatttcacaatcacttaatgactttggctcgctttatatctctggtacccatcaaaaatactggaatacttcggattcagatacctggtatcaggtggggtataccagcagctgggttggtatcagttattcactctcattttcgtggaatgaatctgtagggatccccgataacgaacgtattgtcggacttaatgtttcagtgcctttcaatgttctgaccaaacgtcgctacacccgggaaaatgcgctcgaccgcgcttatgcctcctttaacgccaaccgtaacagcaacgggcaaaatagctggctggcaggtgtaggtgggaccttactggaaggccacaacctgagttatcacgtaagccagggtgatacctcgaataatgggtatacgggcagcgccacggcaaactggcaggccacttacggtacgctgggggtcgggtataactacgaccgcgatcaacatgacgttaactggcagctgtctggcggtgtggtcgggcacgaaaatggcataacgctgagccagcctttaggggataccaatgttttgattaaagcgcctggcgcaggcggtgtacgcattgaaaatcaaactggcattttaaccgactggcgcggctatgcggtgatgccgtatgccacggtttatcggtataaccgtatcgcgcttgataccaatacgatggggaattccatcgatgttgaaaaaaatattagcagcgttgtgccgacgcaaggcgcgttggttcgtgccaattttgatacccgcataggcgtgcgggcgctcattaccgttacccagggcggaaaaccggtgccgtttggatcactggtacgggaaaacagtaccggaataaccagtatggtgggtgatgacgggcaagtttatttaagtggtgcgccattgtctggtgaattactggttcagtggggagacggcgcgaactcacgctgcattgcgcactatgtattgccgaagcaaagcttacagcaagccgtcactgttatttcggcagtttgcacacatcctggctcataaaggaaattatcaatgaagataatctgcagattattattggcgatggaatgtttgtgtctggcaaacatatcctgggctactgtttgtgcaaatagtactggcgtagcagaagatgaacactatgatctctcaaatatctttaatagcaccaataaccagccagggcagattgttgttttaccggaaaaatccggctgggtaggtgtgtcagcaatttgtccacccggcacgctggtgaattatacataccgtagttatgtcaccaactttattgttcaggaaactatcgataattataaatatatgcaattaaatgattatctattaggtgcggtgagtctggttgatagtgtgatggatattcagttccccccgcaaaattatattcggatgggaacagatcctaacgtttcacaaaaccttccattcggggtgatggattctcgtttaatatttcgtttaaaggttattcgtccctttattaacatggtggagatccccagacaggtgatgtttaccgtgtatgtgacatcaacgccttacgatccgttggttacacctgtttataccattagttttggtggccgggttgaagtaccgcaaaactgcgaattaaatgccgggcagattgttgaatttgattttggtgatatcggcgcatcgttatttagtgcggcagggccgggtaatcgacctgctggtgtcatgccgcaaaccaagagcattgcggtcaaatgtacgaatgttgctgcgcaggcttatttaacaatgcgtctggaagccagtgccgtttctggtcaggcgatggtgtcggacaatcaggatttaggttttattgtcgccgatcagaacgatacgccgatcacgcctaacgatctcaatagcgttattcctttccgtctggatgcagctgcggcagccaatgtcacacttcgcgcctggcctatcagtattaccggtcaaaaaccgaccgaagggccgtttagcgcgctggggtatttacgcgtcgattatcaatgaggtacggagaatgagaagagcactctttagctgtttctgcgggttactgtggatttccagtggatgggcagctgaccctttgggaacgattaatatcaatttgcacggtaacgttgttgatttctcctgtaccgtaaacactgcggatattgataagacggtagatttaggcagatggcctacgacacaattactgaacgctggcgataccacggcactcgtcccttttagcctgcggctggagggatgtcctccgggttcagttgcgattttatttacgggaacgccggcatccgataccaacctgctggctctggatgatcccgcaatggcgcaaaccatcgccatcgaattacgtaatagcgatcgctcccggctcgcactgggagcggcgagcccgactgaggaagtagatgcaaatggcaatgtcacactaaacttttttgccaattatcgagcgttagccagcggtgttcggccaggtgtggcgaaagcggatgcgatatttatgatcaattataattaatattatattaattcgtataatttggcgtagtcgataagctctacaattgaatgcaaacctagcttgccataaatattagatttatgcgcactaactgttttattgctaagtaataacttatcggcaatttctttattagataatccgctaaccagataacgtaatatggtcacttcacgattagatagcacagtgaccgttgaactattcgtactacatttattgctttttatatagttaagcgtttcgctgggaaaaaacgtgtatccggagaggatcatctgaacggcatgaaaaatatcattctgatcattgcatttactgacaaaaccgttagcaccagcttgtatcgctctgccagcataaaagcattctgatttcgatgataaaaataacactttcactgtgctctggatttgtttgatccttttcaggaaggtaaaaccgtctgttccgggcaagtctatatccataatgattaaatcaacaggacgggttcggagataatcgatggttatgcggtaatcatccgttttcaggacaatctgcaattcactgtttttttgcaacagaacttcaatagacattctgatgataggatgagtatccataatgatcaccgacgttggtttcatagttaccagtctcataggagcggacaattttccgttagggcggtaaattgtactttgatacatgaaaatacgggttttcttgattcagacgcgcagcggtgtgtgtttgtttgccgctatagcgaaataaatcagaaaatcagacgcggtcgttcacttgttcagcaaccagatcaaaagccattgactcagcaagggttgaccgtataattcacgcgattacaccgcattgcggtatcaacgcgcccttagctcagttggatagagcaacgaccttctaagtcgtgggccgcaggttcgaatcctgcagggcgcgccatttcttcttcatttatgccagtcttatccgtttccgctttgcccttcaccacatcactttttgtcgctgtttggcgagataattcaacggtgtcaggccgtaaaacgccttaaaaacagagataaagtatgacgtgctgctatagccacataattgcgccacctgagtgatatttttgttatccatcaataacatctgtacggcgtaacgcatacgacactctgtgacaatctggctatagctggtattttcgttttttaatttctttttgagcaggctggggcttaaacatagcgaactggcgacaattcgcagattccagtaatgctgaatatcgctttgaataatgcggcagacgctgtcgcggacgctgctgcgtaagatatacatcagtagggcaataaaccgcgattgctcaagaaagttagacaatacggtaaaaagcaatacgcgcgtcaactccgcttcgcagggtttgctgggttgctgcttgctgtggttggcggctagccggaacacttccggtgtacggctatgacaagcaataaccggggttgccagccgcgaccagggctttacacaggttaagttcttatttaaaaacaacagataatcgttgatgatgttacggttgatgtgggtgattaatacgtgatttaacgttgagagttcaatgacgttattgttgcacgcgaaggcggccaggtagtttttcggaagggtaaacgtagcatggttattgacgcttacctctacctctttttcggtcaggatcaccacgcaaggttcactgctgctcaattgcatttcgcactcctcagatatcagaaactccgctcaaaggatctatgcttcctgcatgagtgatcggcccgttcgccgataacgatcttctttctttagcacgctttttagcaattaatcttgatggaattctgacgagagcgaaagaggtaagccaggtcgtacccgacttacctggaggagatttaatactcgagaatgccgtgcgcgacgggcaaatagcgcagagagaaatagagagtgtctttaccgcaagaggaacgtttcgctaacagcgaggcaatttctgcgtccggtttcggtttcgctgtaaaggttttgcctttgccggcgacaaaaagttcataaacaatgccgcttgctggggcggaactttggcaatcggcgctggcttgtagataacgttcacgctgttcagcggtcagtttatccacgccgctgccatcctgtacccaaacattaacgccggttgctttaacgtgttccagcagttggcgatagccatcgggcgacatgtttccggcgaaaaaactactgatataaaccggttttgctgaaacatcgctaatcagccgctgcgcgttgtttaaccatgttagcaaaggctgatgggcagcttcgctgcgccagttcaggtcgtcaatttccgcgctgatgtaccagccatccggcgttatgccaggcgcggcgctccataatctggcttgctggagatcggcagccagcaggcgattaagatagctttccagcgctgcggacgactgtttctggtgcataaaaaattccggatcggcgttcagcccgacaatcagcttcaggccagcctgttgcgcagctgcggcacgcttaaacaataacgtgcgctgttctggctgggtaaatgcatcgccgtaacgggtccattgcaaaaccagggtatcgaagccttgcaaacgtaactgactcatcagcccctgccactgggtatcggtaacctgactatctcggttttgtggttgccagataatacctttcatcgcaaaggaaaaagggctgaccaaaagcagtgtcagcaatacgaaaatgaacttacgcatttaccagtgcactccaatggtgagaaacgcgttgttgcgctctccgttacgttgattaatcgccttaaaggtatgttgatactcgacgccgagactgactttgtgcggccaggcgtcgtagtgcgtctcgccggtccagatattccagcggaccccgactccgccaagctgcgcgccctgagtgcctttatcacgatagccgttgtcctgaacgtgagcgtaaggctcaatagtctgtccgttagctaccttctgatgccagctgacgcgataatctgccgtccacgcctgaatatcctggcggatatattgcgccgcatcgaggtacaggttttgggcaaaccagcctgaaccgttcgggtgccattcgtcgctgtatttgccgccattaaagaatgaggcgctggcgcgcagcatggtatcggatgcgccattttgcccgttcagcggcaactgctgttcgacggcgaggaaaaagatctgatcgcgcagcggcttccagcgcagaccggtgccggacatcggatttttcaccggcatcatcaccccgttttctccggtatcggcaaagacgcggctataaactgagagcaggtcgccttccagcagcatattgcgtccgatgcggtactcggcttccagttgcccgtagctacgatagcttttccctggcgctgcgccgccgacattattgttagcggtgctcattgccccggaacgcaagccgatagaagaatcgaaactgaacgtccagcggcgaccgacctcctcatgcaaacggcggaaattgaagcgttgctgattttgctctggggtcagtggggttatcagcgcctgattatcaatgtcatcaatcaccagccgggcgtagtgctgcgtcgcaggcatgtcatccagacgctggttcacgtaggccagttgtcggatcagtgccggatcgtccggaagccctttatgcgcctgttcgagcatttcccgcgactgtgcgatatcaccgctatcccacaaggcgtaaccaagcgctgcctggatgttgctattattcggttccagttccagcgcggcgcgcaaatcactcaccgccgccgggacattatgacgttggcgataaattgtcgcccgcgcaacgtaagcgttggcagaaggcgcaatattgattgagcgcgtgagatcgctcagtgcgagttccggctgaccaggaatgtaacgttgcgcatgcagccaccagtagagggcattgtttcccagtccacgttgttctgcctgttgtagccagcgatcgcgagctgcaccatttcctgccgcctgggcggtattggcagcagcaagcagatcctcattgctcatgtcgtgaagactgattttctgccaggccgccagtgcggtggcgtagtcctcaacctgatacgcctgataggctaccgcacgatgttgccaggcgttcggttgtcgttgttcggcctgaagccatgcatacagcgccacaccgggtagcgtgtcccgataacactttgccagacggttccaggcggcagcatcgtaggaaggcgacatatcgcccagcaagcgaactattgccgggcaattatctgcaatacccggcaactgactttgccactgacgttgctccgccagcggtaagggtttcgataaaatcgccaccttcgccggcgttgccaggtaaggatgactttccagcagagacgccagtcgcgccattaaagtctggctgacacgcgcatcgccctggaaaggatagcgttgcagcaataaatcggcagcttcgcgtgactgctcgttctgcatcagttgccaggtcagttgatccaggcgggtaagatttgccggttcttgctgatacagcaatcgtgccagacgcagagattcagccttgttacgggtcgccacgctgacagcataacgctcctcaagcatttcattggcggggagggtggcgagcagtttttgcgctgcgtcgtactgaccttcttttaacagcaccggtagcgtcgcgccaacaacatactggcggttatcggcaaactgcaccgtataattcgccaatgcctgaacggggttggcgctgtatttagataacagatagagccaacttttctcttgtgcgtccgtggtaaacagcggcttattttcattgagataatgctggaggcgtgctttttcgccacgataagccagcgcggtcgcgtaagtaatatatgactgaggatcggtgaagatcccctgtgattgcagtgccaggatccgatcgtccagctgcccggcaagaagcacgtcaaaccactgacggcgttctgccgcgcttaatgtgttctgctggcgtgcttcattgtatagcgtatctgcctgggaccattgtttcaggtagattgcccgttgcagcagatcggttcgcagcgtttttccttctggcgatgcagcaaacgtcgcatcgttcagttgcgctctggcgacaggtaattgtgccagccgcagggcattctgcccgacttcactgcgacaacgcagggtcggcgcagcgtcgcacgctttttgctgggcaagcagttcttcaacagtcgtaacgcttttcacttcaaccggaatagccgccagactgcgctcaagtcgggcatctcctgggtgacgtttcagttgatcctcaagcaacagccgcgcccggtcatcatgaccaaaatggcgataggcttccgcaaggtataaagtcagcggaatattatccggcacctgctggtgtatatattcaaattcgcggatggcggttgcttcgtcgttatttttctgtgccttcagcgccttatcgagacggggataaataacaaaatggcgataatcgctcagccccagctcttctgcgctggtgccgatattgtctgcgagtgcgctggtactcaataaagacgtcagcagtaaaccagaccatccgatgacgcgattaaggttattctccttcattttcggactccagttgcgcaacctgttctgtgtttaaacctgctttgagtaatagtgattgcatcgaaacttgtaattcgcgttgaattgtcaggacgcgatccaacgtttcctggctgataacgccttcggtgaccaaaaacttgccgagcggcagagaactgcgttcatggcgcaataacaacacgttaattgctgaacgattaatatgaccgagcgtggtcagtatttcggcgaacaggaactgatgcggcacatattgccgccagatttcaccggtctgctgttccgtgagccactgatgctgaaccgcattgtacaacattgcccgcggatcgtgaccgcgtcggcgtgcataccagtgacgtaaccccgtgacaatttgtccccgcagaacaatgacgtaacgcactttgcgtccgactttacgcgtcagggccgccagcgaaaccgggtcaataccatcttcactgccgacaattaactcatcattttccagacgcagcggcagtactgcataatgcagcgctacggaggctggcatttcggcaatcagcgaggacgggatctgccaggcatcgatggattcccacgccacgccgttttgctctgccagcgcctgtgccagctgctcggcgctaatcagcccctgcatcagcattgaaccgcccaggcgtagaccttcgacgcgattacgcagtgctgtatcgagttgttcttcagtgatgacctgattttccagcagaatttggcctaacgggcgcaacgagcgggtatcgccagtcacgctggggaagtcatgcgttgttttatcccacgcgacgcgacgtggatcgccgtgttgaagtacctgttttagcgcgcgccagttggccatgaagttaatcaggttgccccagaaaagacgcaggacagatagcagcccctgcgtcagaccgtagtagccagtgacgaaaatcacccgctgcacgatgcggttaaccatcaagccaaagtttagccacagcagggtcattaaccatgcgctgccgctaaaaatagaaaggaaatgccaggcatcgggccacaaactttcatacgccagcaacagcaaaagctggagcatcaccagcatcgcgaggaagctgacaaagttactgattgcccctttgcggtcgcggcagagaaagtagttcagcgtcaggctggaggtccatttgtgggttttaaagccctggaaaacaatgccgatgatccagcgagatttttgtcgaactgcagtcgaaaaggtatcggggaaatattcgcgcacgcagatcatgtttgacgtccgtgcgtgctgtaaaaatttacgctgctcgcgttctttggcttcgtccaccaccggaaaacggacaaaaatttccgtcatacctttctctttcaggcggaaaccaatgtcgtaatcttcagtcagactctgcacgtcgaaagcaataccgtcaccgtcagctaacagagcggtcacggcgcggcggctgaaacaggtgccgacgcctgcgctgggcacttgtccggcgagggcttcacgcaccggaacatctttgccatgcagctctgaaaactcatcaatgtaagtcatgctggtgaagtgcgtccattcgcgttcgaacggatacaccgggatctgaatcagatctttacgctcgaccagatagttgaacagacgcaattccatcggtgaaatcacatcttcggcgtcatgcagaataaaaccagcaaaagcgaaattggcgctacgttcaaactgggtgatggcgtccagcacgttgttcagacagtcggctttgctggtgggaccaggacgcgcgcagactaccttatgcacgttcggaaagcgagcgcacacttcgtcaacatcacgttgagtatcggggtcgttggggtaggtgccaacaaagatatgatagttttcgtagtcgagcgtggtcgccgccagctcggccatattgccgatgacgcccgtttcattccacgccggaaccataatcgctaacggtttttcatctggtttatacagttcgcggtaactcattcgcgggtagcggcgataaacactcaacttgcgtttaatgcggcgtacccagtagacgacatcaataaaaaaatcgtccagcccgctgatgaacatgatgaccgctaacgttatcgcgattacttttaagccgtagagccaggttgcaaaaacatcaagaagccagtccacacaaaaaccttacattaacgctggttatgtttagggtggcgtatattaaggttttttatgaattgtgacagctttttaccattaataggtatgactattgcggcacgttatttttacactggttataaaagttgccgtttgcgtagaatgtagacaaaagcgtggtgtcaaggaggggaggttaacgtcatagtgaagaggagtggtggcaccgatcaggtcatcatgtagtggaagtgcctggaggaaatgagcaggcagggcaagattacgaaagcccgctccccgcaaggactgacgccagatagtttctgtccatggctgcttttcgcatcttacgtcttaaccctgccttgaataccttatcattcgtcaaaatattaatagcgatgtgccgtatccctgaaaataattctgctgcatttcctcttcttattttgcagtcgtcttcattcattaccacgtccagacgccagtgcagcttattctccacgtgccagtggtttcggattgctgtggcgaacttctctgcggttaaatcagcagaactgatataatatctgaccgtcatttctggctccttcttttgttctgctattatggaccgaaaggagactgccacgcataatttcttcagccctttccattcaaacgtgaaatcaataagttcatcaaggacatcgcaaacaatatgaagacggatttcttctctgccgtgactcttttcactaattgcgtaactgtcatgctctggattatttaattctttcagcggaaatttttcctcaaaggctttatttagccgcccctggtttccttttaccgcgaataaataatcacctccctgtttttgtatcttctctgctatatctttctggcaacccatcgcatcagttgtgatgatttttcctttaatatccagcatgttaagaagttctgggatagctgtaatctcattagatttctcatccgtcttgatctgtccgatgaccagactgtgcattgttgagaacgcactaatgacatgaatcgctcccctgcggcgactcttgtcataagagtgccggagcgtttttccatcaattgcaatgacgtctttatcatttgatgaatgacaatcacgcatccagttaataaagcactcatgaaattttgtaggactgatacaggatacaactctggcaatagtatcgtgaacaggaataccattttcaaaatcaccatattgcttcaagaaatcgagatgtgtttccccgaaatcctctatatcttcccaactttctgcaccagaaataacggcgcaaatagtcaacagtagaatatccgataatttatgttccactttccaggcttgtctgtaatcgggaataatagaaatatgttccatcaattttttaagttccattttgttctccttaattatgtaaggagtatttgatcatgtataagcaataaaaaacagcttcaggtaatgaggaatatctcaatttttaaacataaaatgtgaattatttagtacaaaaagtgtacttctgatgatctttccctgtatacatccggtctgcggggctgtgtgccaggcggtcatcgtcggtatcgccggtcacctggtggcgcagacgcattcccggaaaggcgtcataaaagaagcggcagctcagggcatcacggtcgaacagcaccaggtaatcatcgcggcggcgcaggatgtactgggcgtgatacgggttactggtttcgatattggctaacatccgctgttttattaatgcgatatctaaaatcaggatggaaatagtgatgtatatcactatttccatgatcttgccttgcgttcatccaggcaggaatatccctgttagcagcctctgtgcgatgtacgccagcggtctgtaaagaaaccgattaccttataacaaaacctctaacgtagtttataatacatcaggaatattaataaaaccttctgggtcagatatctcaataaatatcatatcaggctcaaaagtttcagggacttttaatttcgctgaaattaaccaaccttgcttagaaccaatactaatagatttatagctgtaattggcatgtagactatttttaatataaggaatttcccttaactctaactcacgccgagccaagtcaagagccatttcgatagttattttgttatgttttatcaatttgttagtcccatcatgaatttttctctcaatccctcaacatattttatggcatgagctatttccgcttcattgaataaatttttactttttaatatttcatttagaacgtgttcctccctagataaacgtcctagtgcttcgtatgcttctcgtccaattttcgcaaattgcttagcatgaatcacttcatgatacacctcatataaggtagcatttttcctaagataaatattgcgaaggccataatcaaaagctgccctagcatttggtggcaaatatttatctgctttccttattactttaattcctagcttctccatttctttagcaatattgtttatttgactacgtgataaacgaaccccatccaggaaacccgtatgcccactaacacgacgaccatcgccaatatagtccatcaaactgctgattttagaacttgcagccaatcccagcggatcaacccacccacaaggattcggcacataccggtaagtctgctccccgcccagcaaccccagcggatcactcaccaggtacattccggtttccggctcgtaataccggaaccggttatagcacagccctgattccgcatcctgccactgtcctgcatacagcaggccggggtcggcttccgggtccagttccccgcgcgggtccgggtagccggtgtctgcgggcagactgagtgccagcccccacaggctggtctgccccggtcgccagacggttttaccttcactgttaaagagcatcagcgggcggcccgtcaggtcgctcaccgcgtgattcgtccgcgtcacccactgcggggccacggacgggtgcggctgccgtacccggctgaactgctggcttatcagctcaaagccgttaaacaccaggtgccttacgctgtacagtttatcatcgcggtattcccggatttccgcaatactgtcgccatcccacaggtacgtaaaacggattttcttccggtcgcagcgtttctctgttcgtctgccgctggcgtcgtggcggtattcccactgctcaccctgtgcgctgcaatacccggtcagctggtcacggctgtcccaccggaaccgctctgtttccgggcgatagccgtcacggtgttttgtccggctgaccatccggcctgcggcgtcatagtcatactgcgtgtttccggcctgtttcagccggtggcctccggcataccgctcagtctcttcacttatccggtgcctgcccgcagactgcgccttcaggtagccacaactgtcatagccataggactcatcgccttcgccatagcccagcccggtgcctgaggctgtcaccgccgtgacctggccgttccggtccagccggtattcccgccgcgtttcccgtccgtaatcttcccggctggtgacgcctgacacattacccgcgctgtcgtaacggtactcccgtaccagtgaggggagcagcccgccccatgtggcttctgccgggaaaagtccggcgcgctggctggtaagctgaccggctgcattccagccctgttcacaggcaaaaccccggttactgtgccggagcacttcacgtcccgcctcatcacggctgaacgtcagcgtctcatcccccggcaggataacctccgtcagttctccggcggcgttgtaacggtaggtggttttcagcagggattcatcgggatgtctgtcgcgttcatcttccggtggcaggatacagcggatgacggtgtgttcgtcggggtagtggtattcaatggtccgtcggccctgagtggtgacattcacccgcccgcgttcgtcatagccggtgcgctgtgatatgccgtccgggctgaagatacccgtcagcctgccggatttgtcatacgcatactgcgttttgccttccggcgtgatgatttctgccaggcggcctgcggcgtcccggctgtagaggatggtttcctccagaccgttgaccctggcggtacagaggccatcggcgtcatagcggtaacgccagaccacgccgccccagtcacgctcttccgtcacccgtccacagttgtccagaatataacggtatgactcgccctgcggattgatgacttctgtcagttgcagcgtgtctttatcgtagcggtactgccagcggtggccttcaccgtccgttcgcgccaccggcaaatcgaacgggccgtattccatcgtccagacaacgccgttgccgtccgtccaggccagcaggttgccgtggcggtcgtagctgaacccttccgcgccggttccagcacgttcaatgccactcagtttatggtgctgctgccactgtaaccgcactgactgaccgccggggccgcgcatcttcaccggcaggtcgtgaccgctgtattcggtgtggtgttcacggcccatcacgtcggtgagtgtttccggccggttgtggtggtcgtactctatgcccagacgccgttcatcctggcggaatatccccgacagcagcccctgagcggtgtatgccagccgggtctcttcgccctgtggcgacaccagacttaccggcaggccgcgttcatcacactgctgtgtccacgtctgcccggctgggtcggtgatgttgctgagcaggccgcgctcatcatagcggtacagccactccgcgccgtctgccgccgtgtaacggcttaactgaccgagtgcggcgttgtattcaaacttctccacccgcccggcaggggagtgacgggccagcaggtgatggaattcatcccattcatacgtggtggtgctgccgtccggcgctgcttcccgcagaatattgccgtcaggatcatagtaataacggtgagtgcccttgccgtccgtcacggtggtgcagccgtcaccatagtccagcgtggcgttgtaatagccctccgccccggtgacggtcacgcaccggccctgtgcatcgtaggtgaaacggctccacgtctggtcgttatcggaccagcggatgatccggtccgcagcgtcgtactcataaaacaggtggtagtccagccgcgcatccgcttctgtcagccgcccccgcgcatcctgttcgtaggtcgccagcgtctgtatgccgttatccgtgcggtgaatggctttcaggtagccgctggcgtggtacgtcagtttaagccggatcccgtcggtgtgactgacacccgtgatccggtactggctgtcgcgctcaaacgtgatgcggttgctggcggtgtcgctcatcccgcccagcatgtacatccggtcattggggctgtgtgccaggcggtcatcgctggtatcgtcagtcaccgggtggcgcagacgcattcccggaaaggcgtcataaaagaagcggctgctcagtgcatccctgtcgaacagctccagataatcatcgcggcggcgcagaatgtactgggcgtgatacgggttaaccgtcgtatcactgtcaccgtcgaaggcaaatctcagcgtggctccctggctgatgatatccacccggtttccctgttcacgcacccaggcgtattcgctccaggagtcgctccagcccacgcccgtcaggccatgcagcggcagtacagaactgtggaaacgggtgaaggagagggggagggtctggcccagggtgaagtcggtacgttcgtcgcagtatgcgccggttaccggatcgacaggatctgttacccatctgatgactttattggcaatactttttaacgacttacctgttttccccagcaacgcgccgagctttgcgcccagcagcttcccgcttttccccagcaggtttcccagtttgccgagtctcgccagattcttcagttttcccagcagtcccgcaggcggcagaagatagctggctatcgttattccccccaggatcattctctgccacggcgggaactccggctggatatccagataggtcacctgttcaccgccaataaagacgtccggcgaacctcccacgatcgccgcactgcactccagtttgtcccctttgcgtgcggcaggctgattgttgataaagacgttgctgctgccctgggctatcctcggtggtttgttctccttgtcgcagagcgccgtgtcctcaccggcttccgggaaatccacctcttttttgatttcgccacgcccgcccaccatggtggcaaactccattaataccggaccggcgggaaacagaagcgatgcgccggcgctgacgcgatccataaaaccggcattgctgtccgtcagggtgataacagcgttcccccaggccttcgccagtggtactgctttttccgctgccgattcaagcaggtcagtggcaatatcaccccatgagggttccccctgtgggacttcaggtattgctccaggtgggggaggagggggaagggtgaccgctgcacgtgcggccagctcgccgttaatttttacgttttcagaaccggtattgatggcgccgtccgtgtcacaaaagctgtttatccatgattcaagctggttctgtttctcctccacataatcactcgccttatagctggcatacatcagcgcaggcaccagaaccagcgcataagggccggtggcacaggcggccataatcaggcaaccttctgcgatggtcactatcgcccccagcacggcccctgccagcgcccccaaaaaactcttgtgctgaatttcatcgcccagcctggcggcgggggggccggacttttttgatgccaacatctgtgcaatggctttgtcgttggctgcccgtttcatctggctggcgaccatcgcctgctgtgacagcattcgcattgccagcgtaccgcctgcggtcgctccctgtggcccgcctggtccttcactcatgtgttatccctcgtttatgtcagcgcggctggtccttttggatgtcattctccggtggcaacggggtgaagctctttatcacctccagcagcatcgtcttttgactgttcttcagggataaggaggtgctgaaagtgaaggtcagcagcgtatctccacgccgctggaatacggctatctggctaatccgcccctgattcccctcatcttccggaccgttccaggaataatccagcagccaggccggggcctctgccagagtgatttcccggcaggcatgttcggtgtacccatcaagtttgccctggtacagcgccagcgtttcctggtacagctctggtgtcagggttccctgtggaacggcttcgcgggtaatgaccaggttgatgccactgttatctgtggacaccaggacctgcattgactgatcctgccattgagacggcagttgaatgtggccttcattaaaagtgaactgcataaaatactccctgataatctgagtgaatcagttgatgaaaacagaaccgcccacgatggtgatgccatccttcgacagcctgattaccgtcgattccccgacctgtagctgaatgccatccggcgtcagcgcaattttgctttcctccacggccagcaaaatttccttaatcgccgtataagcctgtataccgtcgccttcgccaccattgtttacagcgtcaacatgcaccgaaccggcaatcgtgcctctgtcctgaaagacatcctcagataaagaccctttcagtactccggtgatcttgtggcctttttctaccgtaagaaggcggttaccttcctggatcgtgaccgtctggtcattttttacggtttcgcggtgatcgtgttttacggtggtggtacggtcgttgagcacttcggtatccatgttcttctgcgcgtggatgtagacctgttctctccctgtcgcatcatcaaacttcagctcattaaatccgctgcccatgtacgttttggagcggatggtcatctgcgtctttgttcccggcaggctgccgggggggcggttttcctggtggtaggtgcgccccataatgatcggctggtccggatcgccgttgaggaagtctacaatcacctcctgacccacacgcggtatcgccaggtggccaaaaccggtgcctgcccacgcctgtgccacacggatccagcacgaactgtcttggtctgccgggttataacggtcccagttgaacttcacccgcacgcgaccatgttcgtcgcagaagatttcctcgcctgccggtcctgtcacgacagcgctctgcgggccgtccaccagcggtttcagcaacggctgtggtcgccatgttctgtctgccgggatcaccgcaaagtgattattcagcgtggtgcctgaaccactgcgtcccggtaccgcctgtggctgttcgccgtgcagttcacttgccaccacctgccattcccggttcaggttcgcctgcggatgccccgtcagcacaattcgccgtcccggccatatctccggcgagcggctcattccccgcgcggtttctgcgttgtttcgccagccgtccatctgccagcgggcaaagttctgcccgtgggcgctcttgaaacgtccggggtagtcatacacttcatactgcgtgcgctggtagtcctggtgctggccttcctgttcaaaacgtccggcccagccggggcgtttaaaggtgtagtctttggtcaccacggaagaagggcggatttgtgcgctgtagcggaactggctgatgcagagggtgctcacctcggtacgggtgttcgggttccatgggatttcaaaagattcgggcagatggcggactgtgtcgcacagcaccaggctctggtcggtacttttgtaagcatgctcctcataaaagaagatgccttcctccgccgccatccggcacaggaaatcgtaatcagtctcaccgtactggacacaaaactcacgggaaggatgcggctcgctgaacagcggactccattcggtcaccccgttttcctgcaacatcgtgccgaggatgcttttgatgtcctcgttctggaagatacggaagttctggcgcagaccggcacgccacagcggcgggtgcaccttcatgctgtacagcatctggtttttgtcgttctccccgagttcaaaccaggtcaccacgcctttcacccggcgctgtacttcatcgccctgccatatcgtcaggtaggccattttgtccagcacctgcgcaaattcaagggagagaaactgctggctgaccagggagagatcgagggaaaagagcgaagagagtgactggttcagatgaaaggaaaccaccgcaaaagcatccggcggcaggccgtccacttccagtgtgaaacgtaatccggttgacatagcaacctccagtaaaatgaataatgatccgtaccgtacaactgcggataatgtgataagcgggacgacttcagacgttattagggaaggaacagaaaatgctatggttatgtgagaattttgtttaaatattactttacagaaacgggtgtctgttcagtcaaaaaaataatcacaagctcaacctcttgtttcttggcgttattcaggacaggtacgcatatcacaacgagtaacaaaaacgcaaagttaaaccaatattcataatatatttttattcacagcaataaataatccaattaacattattaaaatgaatgattgcataagaaatatatgctaccgctccaccctgataacatgatctgcacattgcacatcttaacgttgttaaatactggctcaatagtggatattttaaattagggatttatcaaattcacttgataaatagattgagtgaataatataacaattaatgatgattaatcgcgattaaattattcattgctttatatgatagatggcttgtttataacgatgaaaatttagaaagggcattgtgatctacaattggaagaaacacagatttaactaagtttcatatacaaacatctcgtgaaactttgaaaaataaaagccttcgatatttcatatgtttaataagtttttctctaatttgttgatcaacaataccaggaggtgatgcaccacgccctgaatttgaacttaataatcactctctctccggcagcataatcacaaaccttgtcccccgcgcatctgacgttaccgcaaccgtgcctttatgcgcgacaacaatcgatttcactatcgccagcccaataccgctaccttcaccttttcgctggcgggaagggtcaacgcgatagaaacggtcaaacaatcgcggtaagtgctcgggcgcaatgggcgtaccggggttttcgacggaaacttgcacctgatgattgaccgtctggcagcgcactacaatagcctcactgggtggcgtataacgcagggcattagaaagcaggttgcttaacgcccgacgcagcatcagcggatcgcccgcaacctgacatttgtcgccaacaaaccgcaactccacgccgcgatcttccgctaacgcctcgaaaaaatcgaacactttgccgacttcatccgccaggttgagcattttcttttcggggattagctggttgttatcggcctgagcgagaaacagcatatcgctgaccattttcgccattcgcgtcagctcttcgagattagagtagagcacatcttccagttccttctggctgcgcgactggctgagggcgatttccgtttgcgttatgagattagtaattggtgtgcgaatttcgtgagcgatatccgctgagaaattggactggcgggtaaagacatcctcaatacgctcgatcatatggttgaacgacagtaccagctgttccagctcaatgggcacggtctgcgggtcgaggcgaacgtcgagatctttcgaggtaatattctggatttgacggctgacgctgcggatcggcgcgtgacctttatgtaccgccaatagcacgataaagacgatcaggatgctgatgatcgatgcggtcataataagtttattcatcaaatcatttatgtaatgaagatgaaaatcgatcgaaagcgcgatgtagagcgtataaatcggtttgccgtccaccaacgggccaaccgacaagttaatcatccgccagttgctgtgttccatatgcccgtgaccatgccctggcatcataatcgtcgggccggaaaggagatacacctcgccgccccgcgcgtctttatcgggtatggcgtcacgcgtaaactcgcggatatccggcgcaccgggggagtgatacaccgttttaccatggctatctgccagggagatcaacacgttggaataaccactgacgatatcttccagcgtcattaagcgtcgggcttgcgtctcgtcaggatgattaagtacccgttcaagcgtggcgctaatttcttttaaatcattaatatcctgctcggcaaaatgcacttttactgagtggatcatgatccatgcaaaggcgaaaaacgctgcgatggtggccaggctgataaaaaaggtcaggcgggttgccagcgaaaacgggcgctgaaatggcttactgaccatccggcacctcaagcatgtaacccacgccgcgcacggtctgaattagctttggctcaaagtcgttgtcgattttgccgcgcagccgcttcaccgctacatcaatggcgttagtgtcgctgtcgaaattcatgtcccacacctgcgaggcgataagcgagcggggcagcacttcgccctgatggcggaggaaaaactccagcagagtaaactctttactggtcagagtgatgcgcgtgccgctgcgggtgactttgcggctgacgagatcgaccatcagatcggcaacctgaaactgactttcgataatcaccgccgccccgcgccgcaggagagtgcgcacccgcgccagcagttcagcaaaagcgaacggcttcaccagatagtcatccgcccccaactccagccccttgacgcgatgttcaatggtgccaagcgcggtaagcaacagaatcggcatccctttattggcggaacgcaacatgcgcacgatatcccagccgttcacgtccggcagcataatatcgaggattatcagatcataatcaccggtcatcgccagatggtagccattcaacccgttgtcggccaaatcgaccacaaaaccggcttcggttaaccctttggtcaagtattctccggttttcttttcatcttcgacaatcaacagtttcatatttcctccgcatgttgcccgggcaattctagagtagcgggatcagatggcaatcgcttattggcaaaatgacaattttgtcatttttctgtcaccggaaaatcagagcctggcgagtaaagttggcggcataaaatcaccagaaattatgagcctatgtctccttgtaaacttctgccattttgtgtggcccttgcgctaaccggttgttcactggcaccggattatcagcgtccggcaatgcccgtgccgcagcagttctcactcagccagaacggcctggttaacgcagcagataactatcagaacgcgggctggcgcaccttttttgttgataatcaggtgaagacgctgattagcgaggcgctggtgaataaccgggatttgcgcatggcgacgctgaaagtgcaggaggcacgggcgcaatatcgtctgaccgatgccgaccgctacccacagctcaatggcgagggcagcggcagctggagcggtaatcttaaagggaataccgccacgacacgggagttttcgaccggccttaacgccagctttgacctcgattttttcggtcgcttaaagaacatgagcgaagccgagcgacaaaattatttagccactgaggaagctcagcgcgcggtgcatattctgctggtttctaatgtcgcgcaaagctatttcaatcagcaactggcgtatgcgcaattgcaaatagccgaagaaacgctgcgtaattatcagcagtcatatgcgtttgtcgaaaaacaactgttgacaggtagcagcaatgttctggcgctggaacaggctcgcggggtgatagaaagtacccgcagtgacatcgctaaacgtcagggggaactggcgcaggcgaataatgcattgcaactgttattgggaagctacggcaagctgccgcaagcgcagacagtaaacagcgacagcctgcaaagcgttaaattaccggcgggcttgtcgtcgcaaatcttattgcagcgcccggatattatggaagctgaacacgcgttaatggcggctaatgccaatattggggccgcacgcgcggcatttttcccatctataagcctgaccagcggaatatcaaccgccagcagcgatctgtcgtcattatttaacgccagcagcgggatgtggaattttattcctaaaattgagatccccatttttaatgccggacgcaaccaggccaatctggatatcgccgaaattcgccagcagcagtcggtagtgaattatgaacagaaaatccagaacgcctttaaagaagtggcagatgcgctggcattacgtcaaagcctgaacgatcaaatcagcgcccagcagcgttatctggcgtcgctgcaaattactttgcaacgggcgcgggcattatatcagcacggcgcagtaagttatctggaagtgctggatgccgagcgttctttatttgcaacccgacaaactttactcgacctgaattatgcccgtcaggttaacgaaatttctttatataccgcacttggtggcggttggcagcaataacttttaactccaggagagaataaatgaaaaaagcactgcaagtcgcaatgttcagtctgtttaccgttattggctttaatgcccaggctaacgaacatcatcatgaaaccatgagcgaagcacaaccacaggttattagtgccactggcgaggtaaagggtattgatctggaaagcaaaaaaatcaccatccatcacgatccgattgctgctgtgaactggccggagatgaccatgcgctttaccatcaccccgcagacgaaaatgagtgaaattaaaaccggcgacaaagtggcgtttaattttgtccagcagggcaacctttctttattacaggatattaaagtcagccagtaacccaggtttaatgagatgaaaaaaatcgcgcttattatcggcagcatgatcgcgggcggtattatttctgcggcaggttttacctggtttgcaaaggctgaaccacccgcagaaaaaacgtcgaccgcagaacgtaaaatcttattctggtacgacccgatgtaccccaatacgcggttcgataaaccaggtaaatcgccgtttatggatatggatctggtgccgaaatatgccgatgaagagagttctgcgtctggtgtgcgcattgacccgactcagacgcagaatctgggggtgaaaacggctaccgtcacgcgcgggccgctgacttttgcccagagtttcccggcgaatgtcagttacaacgagtatcagtatgccattgtgcaggctcgcgctgccgggtttatcgacaaggtgtatccgcttaccgtgggcgataaagtacaaaagggcacaccgcttctcgacctgaccattcctgactgggtggaagcgcagagtgagtatttactgctgcgcgaaaccggcggtacggcgacccagactgaaggcattcttgagcggctgcgactggcgggaatgccggaggcggatattcgccgcctgatcgccacgcaaaaaatccagactcgctttacgctcaaagcgcccattgatggcgtgatcaccgcgtttgatctgcgcgcgggaatgaatatcgccaaagataacgtggtcgcgaaaattcagggtatggacccggtgtgggtcactgctgcgatcccggagtccatcgcctggctggtgaaagatgcctcgcagtttaccctcaccgttccggcgcgaccggataaaacactcaccatccgcaaatggacgctgctacctggcgtggatgccgcgacccgcacgctgcagctgcgtctggaagtcgacaacgccgacgaggcgctaaaaccgggaatgaacgcctggttgcaactcaataccgccagcgaaccgatgctgctcattccgtcacaggcgctgattgataccggcaacgaacagcgggtgattaccgttgatgccgacggacgctttgtaccgaaacgcgttgccgttttccaggcatcgcaaggcgtcaccgcgttacactctggtctggcggaaggtgaaaaggtggtttccagcggcctgttcctgattgattccgaagccaatatttctggcgcactggagcggatgcgctctgaaagtgctaccaatgcgcattgagggaataaccaatgattgaatggattattcgtcgctcggtggcgaaccgttttttggtgctgatgggcgcgttgtttctgagcatctggggcacctggaccatcattaacacgccagtggatgcgctgccggatctctccgatgtgcaggtgattattaaaaccagctatcccggtcaggcaccgcaaatcgttgaaaatcaggtgacttatccgctaaccaccaccatgttgtcggtgcctggcgcgaagactgtgcgcggtttctcacagtttggcgactcttatgtgtatgtcattttcgaagatggtaccgatccgtactgggcgcgttcgcgggtgctggagtacctcaaccaggtacagggtaagctgcctgcgggagtcagcgccgagctgggaccagatgccacgggtgttggctggatctatgaatatgcactggtggatcgcagcggtaagcacgatctggccgatttacgctcattgcaggactggtttctcaaatatgagctaaaaaccatccctgacgttgcggaagtggcgtcggtgggcggcgtggtgaaagagtatcaggtggttatcgatccccagcgcctggcgcaatatggcatcagtctagccgaagtaaaaagcgcgctggatgcttcaaaccaggaagcgggcggttcgtcgatcgaactggcggaagcggaatatatggtgcgcgccagcggctatctgcaaacgctcgacgactttaatcacatcgttttaaaagccagtgaaaatggcgtgcccgtttatctgcgtgatgttgcgaaggtccagattggcccggagatgcgccggggcattgccgaactgaatggcgaaggtgaagtggcgggcggggtggtgatcctgcgatccggcaaaaacgcccgagaagtgatcgccgccgtgaaggacaaactggaaacgctgaaaagtagtctgccggaaggcgtggagatagttacaacatacgatcgcagccagctcattgaccgcgccatcgacaacctcagcggcaagttgctggaagagtttattgtggtggcggtagtctgtgcgctgtttctctggcatgtgcgctcggcgctggtggcgattatttcgttgccgctggggttgtgtattgcttttattgtcatgcacttccagggactgaatgccaatattatgtcgttgggcggcattgcgattgccgtcggggcgatggtcgatgccgctatcgtcatgatcgaaaatgcacataaacggctggaagagtggcagcaccagcatcctgacgccacgctggataataaaacgcgctggcaggtgatcaccgatgcatctgttgaagtgggtccggcgctatttatcagtctgctgattatcacgttgtcgtttatcccgatcttcaccctggaagggcaggaagggcgtctgtttggcccgttggcgttcaccaaaacgtatgcgatggcgggtgcggcgctgctggcgatcgtagtgatcccgatcctgatgggctactggatccgtggcaaaattccgccggaaagcagtaacccgctcaatcgctttttgattcgtgtttatcatccgctgttgctgaaagtactgcactggccgaaaaccacgctgctggtggcggcgctttcggtgctgacggttctctggccgctcaataaagttggcggggaatttttaccgcagatcaatgaaggcgacttgttgtatatgccatcgacgctgccggggatttccgcagcagaggcggcgagtatgctgcaaaaaaccgacaagctaattatgagcgtacctgaagtggcgcgggtatttgggaaaaccgggaaagcggaaaccgccaccgattctgctccgctggagatggtagaaacgaccatccagcttaagccgcaggagcagtggcggccaggcatgacgatggacaaaatcattgaggaactggataacaccgtgcgtctgccggggctggcgaatctgtgggtgccgccaattcgtaaccgtatcgatatgctctcgactggcattaaaagccccatcggaattaaagtttccggcactgtgctggcggatatcgacgcgatggcggagcaaattgaagaggtggcacgaacggtaccaggcgtggcttctgcgcttgccgagcgtctggaaggtgggcgctatatcaacgttgagattaaccgtgaaaaagccgcgcgttacggtatgacggtggcggatgtgcagttgtttgtgacttctacggtgggcggggcgatggttggcgaaacggtggaaggaattgcccgttatccaattaatctgcgttatccgcaaagctggcgcgatagtccgcaggcactgcgccagctgccgattctgacgccgatgaagcagcaaatcaccctggcagacgtggccgacattaaagtctctaccggaccgtcaatgctgaaaaccgagaatgcgcgcccgacgagctggatttatatcgatgcccgcgatcgtgacatggtgtcggtggttcacgatttgcaaaaagcgatagctgaaaaagtgcagttaaaaccgggcaccagcgtggcattctccgggcagttcgagctactggagcgcgccaaccataagcttaaactcatggtgccgatgacgttgatgattatcttcgtgctgttgtatctggcgttccgtcgggtgggcgaagcgttgctgattatcagcagcgtaccgtttgcgctggtgggcggcatctggttgctgtggtggatgggctttcatctttccgtggcgacgggcactggctttatcgccctcgccggggtcgccgccgaatttggcgtggtgatgctgatgtatttacgtcacgccatagaggccgagccgtcgttgaataatccacaaacattcagcgagcagaagctggatgaggcgttatatcacggcgcggtcctgcgcgtgcgcccgaaagcgatgacggtggcggtgattatcgccggtctgctgccgattctgtggggaacgggggctggttcagaggtgatgagccggattgccgcaccgatgattggcggcatgatcaccgcacctttgctgtcgctgtttattatcccggcggcgtataagctgatgtggctgcaccgacatcgggtacggaaataaaagcaggataccccgtttaaccgtgtggattgtgtcttgcgacgatgggcactaaatgttaaaaggtgcccctcaacaaaaaagacacacaggggaaaggcgtgaaaaacgcgtcaaccgtatcggaagatactgcgtcgaatcaagagccgacgcttcatcgcggattacataaccgtcatattcaactgattgcgctgggtggcgcaattggtactggtctgtttcttggcattggcccggcgattcagatggcgggtccggctgtattgctgggctacggcgtcgccgggatcatcgctttcctgattatgcgccagcttggcgagatggtggtcgaagagccggtatccggttcatttgcccactttgcctataaatactggggaccgtttgcgggcttcctctctggctggaactactgggtaatgttcgtgctggtgggaatggcagagctgaccgctgcgggcatctatatgcagtactggttcccggatgttccaacgtggatttgggctgccgccttctttattatcatcaacgccgttaacctggtgaacgtgcgcttatatggtgaaaccgagttctggtttgcgctgattaaagtgctggcgatcatcggtatgatcggctttggcctgtggctgctgttttctggtcacggcggcgagaaagccagtatcgacaacctctggcgctacggtggtttctttgccaccggctggaatgggctgattttgtcgctggcggtaattatgttctccttcggcggtctggagctgattgggattactgccgctgaagcgcgcgatccggaaaaaagcattccaaaagcggtaaatcaggtggtgtatcgcatcctgctgttttacatcggttcactggtggttttactggcgctctatccgtgggtggaagtgaaatccaacagtagcccgtttgtgatgattttccataatctcgacagcaacgtggtagcttctgcgctgaacttcgtcattctggtagcatcgctgtcagtgtataacagcggggtttactctaacagccgcatgctgtttggcctttctgtgcagggtaatgcgccgaagtttttgactcgcgtcagccgtcgcggtgtgccgattaactcgctgatgctttccggagcgatcacttcgctggtggtattaatcaactatctgctgccgcaaaaagcgtttggtctgctgatggcgctggtggtagcaacgctgctgttgaactggattatgatctgtctggcgcatctgcgttttcgtgcagcgatgcgacgtcaggggcgtgaaacacagtttaaggcgctgctctatccgttcggcaactatctttgcattgccttcctcggcatgattttgctgctgatgtgcacgatggatgatatgcgcttgtcagcgatcctgctgccggtgtggattgtattcctgtttgtggcatttaaaacgctgcgtcggaaataaggcattcacgctacatccgacaaaacgatgtccgctctcatccattcgatgagagcggtttttttaattactgcttaaatgcacccgccagagagcgaatatcattgccggttggcgactgatgaagtcgcagaccaaactcttcgacaatcgcaaatatgtgatcgaatatatcagcctgaatgctttcatattccagccacaccacggtgttagtaaacgcgtagatctcgagcggtaaaccgttatcacctggagccagttggcgtaccattaaggtcatatctttacgaatccgcggatggttacgcagatattcgttcagataggcacgaaaggttccaatattggtcattcggcgcaggtttaatatcgactccgtagaaccttgctggcgattccactcattaatttcctgatggcggctggttaaataaggttttaacaagtgcgctttattcagacgttgcatttcgtcttcatcaagaaaacgaatactggtgacatcaatactgatactgcgcttaatacgtcgcccgccagatgctgacatcccgctccagtttttaaaggagtcagaaaccagagaccaggtgggaatagtggtaatggtattgtcccagttacgcactttgacggtggttaacccaatatcgatcaccgcgccatccgcgccgtatttcggcatctccagccagtcgcccagtttcagcatatcgttcgcggaaagctgaatacctgccaccagaccaagaatcggatctttaaaaaccaacatcagcacggcagccattgcaccaagaccgctgatcagaatcgctggcgactgaccaatcagcagcgagatcatcaaaatgccgaccaggattgcgccgatcagtttaatcccctgaaatatccctttcagcggtaactgagatgccgccgggaatttctgcgccagattcaaaataacatccagcaacgagaagactgaaagcagcgcatacatcatgatccacaactgcgcgcaggtagtcagaatatctgccgcttcggtgcctttttgcagccagaataccgcctgaatattgacgataatcccctgcagggtaaaagctaaacggtggaagagtttattctgggtaatgatttgcaaccaaagccgtgaactggcgatggcacgtttttcgaaggtccgcagtaccacccaatgcaaaataatatgcaccacgacggcggtcagaaaaataataccgaaaatcatcaccatcgaggtggtgtgatcgatctcaatacccgctaaatcttcaacctgggatattaaatcctgcataacgtctcctttatacaacagcagcctatgatgacggctgaaacagggttatgcaaatcaggagaatctgaggggaaatagccgggcagatgcccggcaagagagaattacacttcggttaaggttatgttttgcggcagacgagatttcggcagcgtagcgttaaaatcttcaacgctgtgatgacctaccggaacaaccaccagactggtgtagcctttctctttcagaccaaattctgcatcgaggatggcggcgtcaaaaccttcgatgggtaccgcgtccagacccagcgccgccacgccgagcaggaagttaccgacgttgagataaacctgttttgccatccactctgcatcatcatgcagatctttacggtgcatatcagcgaagaacttgcgacctttatcgttcgcggctttcgcttccggcgtggcaaagcggccatcagcatcttcctggtcaacaaccagcttcagccaggcatcgtccatcgcggtttttgcacagaacaccacgacgtgcgaggcatcaagtattttacgttcgttgaacacataattaccggcagcggatttggcaacacgcgctttaccttcttccgtgctggcaacaataaaatgccacggctgggagttggtgctggatgggctgtattgcaggagagttttgatctgctcggcctgttccggggtaagttttttactggcatcaaatgccttagtggaatgacgctttaaggcgacagaaatgatatccataaagactccatgtgaaagtaattttgcgtgccagcagattacaaggttcaacgagaaatggtaagcgagaaaaatgcgctatagatttccgctttagcctggacgcactcttttttgatcgcgtttagccagaccatcaaccaccagattccacgaatcgttgatcagatcgcgaagtaacgcttcggagatttcctcgccgggatacaccgaaatccagtgctttttattcatgtgataccctggcttaatgctcgggtatatctgctgatttaacagggatttttgtggatcggacttcagattgataaaggggacgccgcgcagctccgacgacagcataaaaattttgccgccaattttaaaaacatcgaactccgggccaaaaggccagcaaagctcgacaaagggtaactcaagggccaggcgtttcgccgtttcgtgcagtgattgcttatccataaacgttcctttaggcgaaggagaataagcaaagtatgccgcgaagtacggcgataatcgacgtttaatccgccagcgagaaccagcgtcgccagataaagcgcagaacaaaatactcaatagcgcccagcactaaaaaccacagacaaaacaataaagtgtaaagctggctaagatccatcagatggaacatggtcaccagtttttgtgccagcgtcagccccagtgcgggggcgggcagcagcaggcaagagaggaaagccatcagcaaaatgcctgctgcggtagtcaaggtttctaaagggtgtttcataacattgttaaatgtaagttaaaacaccattgtcagggatattcttctgtaaggcaattccctacttagtcaccggcccagatctcacaatgctttttcaccagcccaatcagcgagccaccatcggcgacgaaatcgcgcatcagctgcgcttcattcagaccgctgacgacctggcgatgcagggcctcaatcgcgctcgatgcacccattttatgtgcggaaggggcgattttttccagcaatcgcaaggtatcttccgttagcggtcgacgatcgccagtgtgcggatcggtaatgacgccttccagcccatagcggcaggcctggaaacggttgaatttatacagcaggtaatctttctcctgatgtttaaacgggcgttccgtcagtaaccagtgggcggtggcctgaattaatcccgccatatttaccgcgtggctaagggttaacggggtatccatcacccgaacctccaccgtgccaaaatgaggactggggcgaatatcccagtgcagatctttaatgctgtcgatcatcgtggtgtaactcaggcagcgaaacagggcttcaaattgttgccagttactgacccacggcatcgggccattatcgggaaaggcggaaaaaatattcggtcgtgaggaggcaaaacgcgtatccgttccctgcatatacggcgacgcggcggaaagggcgatgaagtgcggcacaaaccgtgacaggccgtgcagcaaataaatggcgtcatcgccactggcgcagccaacatggacatgctgaccaaaaacggtcgcctgctggatgagatagccaaagttttccagcgttcgttgatagcgttcgttttcgcatacctcctgacgctgccatttctgaaacgggtgcgtgccaccgccgcaaatttccagatgatggtctgcggctgcctgcaatacgactttctgcatcgctgaaaactgcccggcagcctggttgatatcacggcaaacatccgtcgccagctccagcatactttcggtgatatcgtgctttacctctccggccgtgatctcatttttaaccgcgtcaatcagcattgaagagtcctggcttaagtcatagcccggcggattaaccacctgcatttccagttcaataccgagggtaaaaggttcagaaacatgaaaatcgggtaatggcataggtttctcttaagttggcgttttctattcagtatagaagtcggagcggctgggcgagatgcggaagttctggaatgtttctttttttggtgatggtgactgaagcaatttggctacttttgcaatgtgacaagttatggcacggctggctggtggcgaagaattttgacgattgaggcatgcagaaaaaaacgggttcagcttcagttgatcaaatggggagtgagaagtccgaaacaggacttactgtataaataaacagctattttgctaagcaagggtaagataactgcgggtgcctgaagctttccggtttcaggtttactctgaggtctggaaagatgaagccccaggacgatatttctatcaaccctggggctacctacccaaacctgaacaatttggatggtagtcccttcttcgcatggaggcaatataaacatgctgacgaaatatgcccttgcggcagtcatagtgctgtgtttaacggtgctgggatttacgcttctggtcggggattcgctgtgtgagttcaccgtaaaggaacgtaatattgagtttaaggttgttctcgcttacgaaccgaagaagtagccgttgtgcggggagcaatccccgcatatccggttgtcaggtcaggatggtaaggcacctgctttacactttcgcccgcggtcagtgatggctgcgggcgatttcgttttaagagcaatgatgagttttgccgacagaagtccgaaacaggattcactgtataaataaacagctattttgttgaggaagggtaagataacggcgggtgcctgaagctttccggtttcaggttaactctgaggtctggaaagatgaagccccaggagatatttctatcaatcctggggctgccactccgagcctcaacaactcggatggtagtcccttcttcgcatggaggcaatataaacatgctgacgaaatatgcccttgtggcagtcatagtgctgtgtttgacggtactgggatttacgcttctggtcggagactcgctgtgtgagttcaccgtaaaggaacgtaatattgagtttaaggctgttctcgcttacgaaccgaagaagtagccgttgtgcggggagcaatccccgcatatccggttgtcaggtcagagtggtaaggcacctgctttacactttcgcccgcggtcagtgatggctgcgggcgaatcgtaccagatgttgtcaattaatcgtgttggcacagagttatgactattttttcttttatctgccagtgcacagcaaacatctcattctcacgatgaatgatgacctgctgtttattccagctaattatctgatagtccagaaaacctgcatcagtttggatctcacttgccttaaatgcgctctctttggcggaaaatgccagtgtcagcgccagagaaaaggctaaaccgcagtctgcgagtcgctcgtgttctgctggtgtaataatgttgtctgtcaattcggtcgctgtttgcgcagaaaaaatttcttcgatatcaacgccaatcggttgacgggaaaccacggccaatgccgtagccccgcagtggctaatactgccgtatacctccgcaggccacaccggttggcgtagctcgccgattgcgggcacacatttatagccatattcccgcagcgcataaattgcagcgatccgcccggctaaatgttcggctttgcgcttccgtccagcgtgttgcagttgcgcgtaatgcggcagccagagtaaatcctgctcacaaaaattcgccggatcgaactcaacaaaatgcagcgtatgtccggcaaaggggagggaggtatgcgtagttttcatgtcgaccatattagagactgatgacaaacgctaaactgcctgatgcgctacgcttatcaggcctacatggtcctgcaatatattgaattggcaagatttttgtaggccggataaggcgttcacgccgcatccggcatgaacgacgcgcactttgtcaacaatctgacgttagcatcagaagtgagtgtttacgctcatgtaccacgtacgtcccggctcgttataggtatacgccccggcacccgcgatatagttggcccctgccagatcgcccgtggtctgggcattacccgcacgccacaaacgtttgtcgaacaggttgtccacgccgccggtcagactgacattcttcgtcacatcccaggtcgcgctcagacccacaatgctgtaaggactgatttctttggtttccgggccaaccgctggctgacctttgtagttgtattttttcggctgctgcttaccgtaccaggtgaaggtcgtttgcatcgacaaatcttcccgcgcctgccagctcagcgttgagttcaacgtgtactccgggatgatcgacaaacggtcgcccgtggttttgttttcactcttcagcatataagtgatgttattggtccacatcaccgtttcgctaactggtacgtttaacgatccttccagaccttcaaccactgctttcggcacgttatcccactgatagagatcggtgccgactgcgttttgccctacagccacatagcccgcttcaatcttattgcgataatcgttacggaaccaggtgacgcccgccagccagccgtcgcgtttgaactccagaccaatctctttgttgatgctggtttctgctttcaggtcatcgttaccttgcagatagcagccgcccgcgctggcatagcagccctgacctttactgtagagaatgtagttcgggttagtctggtacaggctcggtgctttataagcacgggcaatgcccattttgagcgtgaagtcatcgcctaaaccttgcgatatgttcagcgccgggctccagttattgccgacaatactgtgatgatcgaaacgcagccccggcgttacgatggtgctgtcagtcagctccatgttgttttcggcaaacagcgagaaaatttctgcttttgaatacgggctacggtcggtggcactcacaccatcaatagcgccgccggtgttcgccccggtcagcgcctgggtattggaactcaagtccttcatccgttgctgattccactccgtacccagcgtcagcgtctggttaacgaggaaatcaatcggcaggttaacttcgctgtgcagcatcacgtcatcgagatcgatatcgacgaaatcctgtgtcgctttttcgttaaatttcccttcggtaccgcccgccagaccttccggaatacgcgagttacgggtgtgttcatactgcacccagttgctggtggtcacgccgttatcccagccaccgttccaggtcagcgcgtagttctggcgatacaggcggttggtttcatcgccatatttcgagcgagtgtaagcgtcagagttggtgttctgggtatcgcccgcatacaggttaccctggcggctgtaacccgcttccagttccagcgattgcaatggtgcgaagtcccagcgcaccacgccgttaatatctttattgatcaccccttcgcgcccggctggtaacgtcgtggcatacgttccggcacgcgcggactgatggccctggttgatatcccacgcgtcagcctgggttttgtcgaggttgccatacaagcggaagctgaattcgtcgcccagcggaccggtcaggctgaagttggtgcgtttagtggcaccttcctctttatgttctggtgcattgaaataagcgtcccaggagccgtgccactcaccgctgccttttttggtaatgatgttaaccacgccgcccgccgcgccgttgccataacgcgcagctgccggaccacgcagaacttcaatacgttcaatcatttcaggtggcacccaggaggtatcaccacgggtatcgcgctcgccacgccagccctgacgcaccgagttacggctgcttaccggcttgccgtcaatcaaaatcagcgtgttttccggacccataccgcgaatatcaatctgtcggttattcccacgctgaccactggtggagttaccggtcaggttaacgcctggcatggtacggatgatctccgacacatcgcgggcaacggggtttttgcggatttcatctgcggtgatagtcgaaacgccaggcgcctgtaagttctgctcggcggcggtaacgacaatggtatcgtcatgtgaaacaggagtatcggtcggctcttgtgcctgcgctaccccataaatccccagattgaccaacaaggccagggaatgaatcttcttgttcattgttttattcctgcatttttgccacgaattgcaactgtcgggcatggtcgtcctcaacacgacgcatcccgctaccgcgaaaacctttgatcctgaaagacacgcagtgcagttggttaataaatgtccgcgcttcccacggcgcgccattacgctattgcaaatgcaaatagttatcaataatattatcaatatatttctgcaatcaatgaaaaattgcacagtaaacatggggttatggtgtgacggcgttaaaagtaggaagtgagagctggtggcagtcgaaacatggcccggaatggcagcgtctgaatgacgaaatgtttgaggtcactttctggtggcgtgatccccaaggttctgaagaatactcgacgataaagcgcgtatggatctacatcactggtgtgaccgatcatcatcagaacagccagccccagtcgatgcagcgaattgcaggtactgatgtctggcagtggacgacacaactcaatgccaactggcgcggcagctactgctttattcccaccgaacgcgatgacattttttctgcaccatcccccgatcgcctcgaattacgtgaaggctggcgaaaactattaccccaggcaatagccgatccgctgaatccacaaagctggaaaggcgggcgagggcacgctgtttctgcactcgaaatgccgcaagcgcctctgcaaccgggatgggattgtccgcaagcgccagaaatagcagccaaagaaattatctggaaaagtgaacggttgaaaaattcacgtcgtgtatggatttttaccaccggcgatgcaacagcagaagaacgtccgctggcagttttgctcgatggcgaattttgggcgcaaagtatgcccgtctggcctgtgctgacttcgctgacccatcgtcagcaacttcctcccgccgtgtatgtgttgatcgacgctatcgacaccacgcaccgcgcccacgaactgccgtgtaatgcggatttctggctggcagtacagcaagagttattacccctggtgaaagctattgccccttttagcgatcgcgccgatcgcaccgtggtcgccgggcagagttttggtgggctgtccgcgctgtatgccggactgcactggcctgaacgctttggctgtgtattaagccagtcaggatcgtactggtggccgcatcggggcgggcagcaagagggcgtgttacttgaaaagcttaaagctggtgaagttagcgccgaaggtctgcgcattgtgctggaagcgggtattcgcgagccgatgattatgcgggccaatcaggcgctgtatgcgcaattacaccccataaaagaatccattttctggcgtcaggttgacggcggacatgatgcgctttgttggcgcggtggcttgatgcaggggctaatcgacctctggcaaccacttttccatgacaggagttgaatatggcattcagtaatcccttcgatgatccacagggagcgttttacattttgcgcaatgcgcaggggcaattcagtctgtggccgcaacaatgcgccttaccggcaggctgggacattgtgtgtcagccgcagtcacaggcgtcctgccagcagtggctggaagtccactggcgtactctgacaccggccaatttcacccagttgcaggaggcacaatgagccagcatttacctttggtcgccgcacagcccggcatctggatggcagaaaaactgtcggatttaccctccgcctggagcgtggcgcattacgttgagttaactggagatgttgatgcgccattactggcccgcgcggtggttgtcggactagcgcaagcagatacgttgcggatgcgttttacggaagataacggcgaagtctggcagtgggtcgatgatgcgctgatattcgaactgccagaaattatcgacctgcgaaccaatattgatccgcacggtactgcgcaggcattaatgctggcggatttgcaacaagatttgcgcgtcgatagcggtaaaccactggtctttcatcagctgatacatgttgcggataaccgctggtactggtatcagcgttatcaccatttgctggtcgatggcttcagtttcccggccattactcgccagatcgccaatatttactgcacatggctgcgtggcgaaccaacgcctgcttcgccgtttacgcctttcgctgatgtagtggaagagtaccagcaataccgcgaaagcgaagcctggcagcgtgatgcggcattctgggcagaacagcgtcgtcaactgccgccgcccgcgtcactttctccggcacctttagcggggcgcagcgcttcggcagatattctgcgcctgaaactggaatttaccgacggggaattccgccagctggctacgcaactttcaggtgtgcagcgtaccgatttagcccttgcgctggcagccttgtggctggggcgattgtgcaatcgcatggactatgccgccggatttatctttatgcgtcgactgggctcggcggcgctgacggctagcggacccgtgctcaacgttttaccgttgggtattcacattgcggcgcaagaaacgctgccggaactggcaacccgactggcggctcaactgaaaaaaatgcgtcgccatcaacgttacgatgccgaacaaattgtccgtgacagcgggcgagcggcaggtgatgaaccgctgtttggtccggtactcaatattaaggtatttgattaccaactggatattcctggtgttcaggcgcaaacccataccctggcaaccggtccggttaatgaccttgaactggccctgttcccggatgaacacggtgatttgagtattgagatcctcgccaataaacagcgttacgatgagccaacgttaatccagcatgctgaacgcctgaaaatgctgattgcccagttcgccgcggatccggcgctgttgtgcggcgatgtcgatattatgctgccaggtgagtatgcgcagctggcgcagatcaacgccactcaggttgagattccagaaaccacgctgagcgcgctggtggcagaacaagcggcaaaaacaccggatgctccggcgctggcagatgcgcgttacctgttcagctatcgggaaatgcgcgagcaggtggtggcgctggcgaatctgctgcgtgagcgcggcgttaaaccaggggacagcgtggcggtggcactaccgcgctcggtctttttgaccctggcactccatgcaatagttgaagctggcgcggcctggctaccgctggataccggctatccggacgatcgcctgaaaatgatgctggaagatgcgcgtccgtcgctgttaattaccaccgacgatcaactgccgcgctttagcgatgttcccaatttaacaagcctttgctataacgccccgcttaccccccagggcagtgcgccgctgcaactttcacaaccgcaccacacggcttatatcatctttacctctggctccaccggcaggccgaaaggggtaatggtcgggcagacggctatcgttaaccgcctgttatggatgcaaaatcactacccgcttacaggcgaagatgtcgttgcccaaaaaacgccgtgcagttttgatgtctcggtgtgggagtttttctggccgtttatcgcaggggcaaaactggtgatggctgaaccggaagcgcaccgtgacccgctcgctatgcagcaattctttgccgaatatggcgtaacgaccacgcactttgtgccgtcgatgctggcggcatttgttgcatcgctgacgccgcaaaccgctcgccagaattgcgcgacgttgaaacaggttttctgtagtggtgaggccttaccggctgatttatgccgcgaatggcaacagttaaccggcgcgccgttgcataacctgtatggcccgacggaagcggcggtagatgtcagctggtatccggcttttggcgaggaactggcacaggtgcgcggcagcagtgtgccgattggttatccggtatggaatacgggtctgcgtattcttgatgcgatgatgcatccggtgccgccgggtgtggcgggtgatctctatctcaccggcatccaactggcgcaggggtatcttggacgacccgatctgaccgccagccgttttattgccgatccttttgccccaggtgaacggatgtatcgtaccggagacgtcgcccgctggctggataacggcgcggtggagtacctcgggcgcagtgacgatcagctaaaaattcgcgggcagcgtatcgaactgggcgaaatcgatcgcgtgatgcaggcgctgccggatgtcaaacaagccgttacccacgcctgtgtgattaacctggcggcagccaccggtggtgatgcgcgtcagttggtgggctatctggtgtcgcaatcaggtctgccgttggataccagcgcattacaggcacagcttcgcgaaacattgccgccgcatatggtgccggtggttctgctgcaacttccacagttacctcttagcgccaacggcaagctggatcgcaaagccttaccgttgcctgaactgaagacacaagcgtcgggacgtgcaccgaaagcgggcagtgaaaagattatcgccgcggcattcgcgtcgttgctgggttgtgacgtgcaggatgccgatgctgatttctttgcgctgggcggtcattcgctactggcaatgaaactggcagcgcagttaagtcgacagtttgctcgtcaggtgacgccggggcaggtgatggtcgcgtcaaccgtcgccaaactggcaacgattattgatggtgaagaggacagctcccggcgcatgggattcgaaaccattctgccgttgcgtgaaggtaatggcccgacgctgttttgtttccatccggcgtccggttttgcctggcagtttagcgtgctctcgcgttatctcgatccacaatggtcgattattggcattcagtcgccgcgccctcatggacccatgcagacagcgacaaacctggatgaagtctgcgaagcgcatctggcaacgttacttgagcaacaaccgcacggcccttattacctgctggggtattcccttggcggtacgctggcgcagggcattgcggcgcggctgcgtgcccgtggcgaacaggtggcatttcttggtttgctggatacctggccgccagagacgcaaaactggcaggaaaaagaggctaatggtctggacccggaagtgctggcggagattaaccgcgaacgcgaggccttcctggcggcacagcagggaagtacttcaacggagttgtttaccaccattgaaggcaactacgctgatgctgtgcgcttgttaaccaccgcccatagcgttccgtttgatggaaaagcaacgttatttgttgctgagcgcacacttcaggaaggtatgagtcccgaacgtgcctggtcgccgtggattgcggagctggatatctatcgtcaggattgtgcgcatgtggatattatctctccaggggcgtttgtaaaaattgggccgattattcgcgcaacgctaaacaggtaaattaataatatctataaacccataattacagaaaataattatgggttttttatttgtttgatttataggtttgatgaatatttctcttaaatagagtgaatgttgcattcagtggaaggaatttacaaacttcagcttcggataattatcaccaactggtaaagtgagcgccgtggagatttcccctattggactcattttcaggttataccccatgtcatcactgaatattaaacagggaagtgacgctcattttcctgagtatcctctggcgtcgcccagtaataatgaaattgatttacttaatctaatcgcagttttatggcgggccaaaaaaacggtcatggcggtcatttttgcgtttgcctgcgcaggcttgctgatctctttcatcctgccgcaaaaatggaccagcgcggcggttgtcacgcctccagaacctgttcagtggcaagagctggagaaaacattcactaagcttcgagtgctggatctggatatcaaaattgatcgtacagaagcatttaacctgtttatcaagaagtttcagtcggttagcttgctggaagagtacctgcgttcatcaccttatgtgatggaccaattaaaagaggcgaaaatcgatgaactggatttgcatcgcgctattgttgcattgagcgaaaaaatgaaagcggttgatgacaatgccagtaagaaaaaagatgaaccgtcactgtatacctcctggacgctaagttttaccgcgccaaccagtgaagaggcgcagaccgttttgagcgggtatatcgattatatctctgcgttggtggtgaaagagtcactcgaaaacgtccgtaataaactggaaatcaaaacccagtttgaaaaagaaaaactggctcaggatcgcattaaaacgaaaaatcaacttgatgcaaacattcagcgcctcaattattcactcgacattgccaacgcggcgggaattaaaaagcccgtatacagtaatggtcaggccgttaaagatgaccccgatttctctatttctctcggcgcagacggtattgaacgcaaactggaaattgaaaaagcggttactgacgttgcggaactgaacggtgaattacgtaatcggcagtatcttgtcgagcaattaacaaaagcaaatgtcaacgatgtgaattttacgccgtttaaatatcagttaagcccgtcattgccagtgaaaaaagacggtccgggtaaggcgattattgtgatcctttccgcgctgatcggcgggatggtggcttgtggtagcgtgttattgcgctatgcgatggcatccagaaaacaggatgccatgatggcagaccacttagtttaactatttgcggttgaaggtgccgttcgtccgagcggcaccacaagcggcgttccggctaccggatcgtcaatgatcatgcatcgcagaccataaatgcgctcaatcagttcagcagtgacaatctccttcggcgctccctgagcaacaattttcccttcccgcaatgcaatcaaatggctggcgtaacgacaggcctgattaagatcgtgcagcaccgccgccagggtatagcctttctcgcggttcagttcgcttaacagttccagtagatcaatctgatgactgatatccagccaggtcgtgggttcgtcgagcagcataattgccgtttcctgggccagcaccatcgcgatccacgctcgctggcgttgtccgccagaaagggtatccacgctttgatctgccagatgagttattcccgtggcctgcatcgctttcgttaccgcttcttcatcctctttgcgccagcgggtaaacagcggttgatgcggataacgtccacgcgccaccagctcctgcacggtgatatcgcccggcgtggtagcattttgcgccaacagaccaatccggcgtgcaacttctttactggcgtaatgttgaatgtgctcgccatccagccagacatgcccgtgagcaggcgtcatcaggcggcttaaggtacgcagtaacgtggatttaccacagccatttggtccgataattgccgtgaagtgaccatcaggaatttctacagtcagattttccgcaacggtatatttgccatatcccagggttaactgttcgccgcgcaaacgggctactgattcggtcattttttgcgagactcctgaattaacaagacgataaggtaaataccgccgaggctgacggtaacgacgccaaccggaagttgatacggcataaacagttgttgggcgcagagatcggccgccagcagtaacagcgctccgcacagcgccgcctgggtcagcccccagcgagcggtgccgctaatgcgtcgggcaatgtgcggcgcgactaaagcaataaaggaaatcggcccggcaagcgccgttgccgcagcggtaagcaccactgcaaccagcatcattaacagacgcgaacgctcgacgctgacgcccagcgcgcaggcggtatcatcgcccatctccagcaagcgcattcgccgcaccagcaaggcggcggcaatgagcatcaatataatgatgggtgcggaaggcgaagtttttgcccacgtcaggccattgagcgatccggcattccacaaacccgctgttagcgccgtttctaaagacgctttcagcaacagccaggtattaaaggccaccagcatggcgcgaacgccgatgccgataataatcaaccgaaaggtgtcgataccgttacgccaggcgagcagccagaccaacagagaagtgacaatgccgcccaccattgctgccagcgcgatagccgtcaggtcctgaccaaacagcaccatcgccaccagcacgccgctccacgccccggtgttaaagcccattacgtcagggctgccgagcgggttacgcatcagcgactgaaaaatcgcaccgctgacgcccagtgccgcgccaatcaacagcgccatcagcacgcgtggtaaacgccattcggtgaccaccatcgtcatactgcgcggcgcatcgcccatcagcgcggcgaatacctgcgaggtttccagcgtgacggcaccgctgcgtaatccccagatacctgcaaccacacaggcggaaataagcagcaaacaggtgatgagtaatcggcgagagacgtaaatcatgcaccacctcgcgttttacgtcgcacgaggaagatcagcaccggtgcaccaataaacgcactgaccacagaaacgcgcaactcgccgggcacaatcacccgcccgatgatatcggcaaacagcagcagggcaggggtagcaagtagcgtgacgggcagcgaccagcgatgatcggcacctaccagccagcgcgccatgtgcggcatcatcaggccgataaaggcaatcgggccaactaccgccgtcgcactaccacaaagcacggtaatcgccagcagaccaattaactgtgtgcgcgccacgcgactgcccagcgccgtcgcggtgtcactgccgaggctcaaactgttcagcgcgcggctcagtaatagcgcggttgctccggcgatcagcaccgggatcagcaccacttttaaggtatgtagattgcgaatatccagcgaaccggcttgccagaaacgcagttgatcgtagacatcaggattaagcagggcgatgccgctggtcagcccttccagcaccgccgccagcgccacgcccgccagggttaaacgcaccggacttaactgcccgccgccctgactgccggtaaaggcaacaatcaatgaggccaccagcgccccggcgaaggccatcgccagttgttcctgcgcggatgagtaaccaaacagcgccgcacccagcacaatggcaaagctggctccggcattcacgccaagcaagccggggtcggcaagtggatttcgggtgagggtttgcatcaacgccccggcaaggccaagcgcgccgcctgcaagtaaaccggcaagggtgcgcggcagtcgcgcgtcgagcacgatggtgcagtcggcgctctggcaggtgccggagagggcctccagcactacggaagcggggagtgattttgccccaatgagcaggcttaatgccgtcgcgataatcagtaataacagcaatccgggcacggcaatggcgcgtgtcacggcaacagaaccagacatacgaacttccatgataatgaaattaattatcgttatcgatcttatttggatatgttagcatgtgcagcctaagaataggtatttaaaatatttgatggcaaggcattgtaatgaataaacaatcctggctgcttaacctcagcctgttgaaaacgcacccggcgtttcgcgcagtattcctcgctcgttttatctcaattgtgtctctgggtttgctcggcgtcgcggtgccggtgcagatccagatgatgacgcattctacctggcaggtggggctttcggtgacgctgaccggcggcgcgatgtttgttggcctgatggttggcggtgtgctggcggatcgctatgagcgcaaaaaagtgattttgctggcgcgcggcacctgtggcattggcttcattggactgtgccttaatgcactgctgccggagccgtcattgctggcaatctatttacttggtttatgggatggttttttcgcatcgcttggcgttacggcgctattggcggcgacaccagcactggtagggcgtgaaaacttaatgcaggccggggcgatcaccatgttgaccgtgcgtctggggtcggtgatttcgcccatgattggcggtttattgctggcgaccggtggcgtagcctggaactacgggctggcggcggcgggcacgtttattaccttgctaccgttgttaagccttccggcgttgccaccgccaccgcagccgcgtgagcatccgttgaaatcattactggcaggatttcgttttctgcttgccagcccgctggtgggcgggattgcgctgctgggtggtttattgacgatggcgagcgcggtgcgggtactgtatccggcgctggctgacaactggcagatgtcagcggcacagattggttttctctacgcggcgatcccgctcggcgcggctattggtgcgttaaccagcgggaagctggcacatagtgcgcgaccagggttattgatgctgctctccacgctgggatcgttcctcgccattggtctgtttggcctgatgccgatgtggattttaggcgtggtttgtctggcgctgttcggctggctgagcgcggttagttcgttgctgcaatatacaatgctgcaaacgcaaaccccggaagcgatgttagggcggattaacggtttgtggacggcgcagaacgtgacgggcgatgccataggcgcggcgctgctgggtggtttgggcgcgatgatgacaccggttgcttccgcaagcgcaagcggttttggtttgttgattatcggcgtgttgttattgctggtgctggtggagttgcgacgttttcgccagacgccgccgcaggtgacagcgtctgacagttaatgcttaaaacagcgccttaagtcgttccagcacttgcgtggcgctgtagtaatccagacggaacgtctcggttcccagcgcataaacctgcttgttttgtactgcgggaaggtgcgcgagcagtggattggcataaatcgcatcggcatctttctgatcaccggcgaacaggaatagtgactcgccatttaacccagcagccagattttccccaccaagctgaatgatgtcatggcgtttgccctggctttggctggcgtttaaccctgcgggcaacttcgccagcgtaaagccgagttgttccagcatctgcccttgtgctgattccggcgtccagagattggcactgtgtgcagcggcggtatagacaatggcagtgaccggctgcggcggtaatttgatttgctctttcgccgctgccagttgcttatcaaactgtgcaatccgctctgccgcttgtttctcatgcccggtaatttcgccaagctgcgttaacagcgactgccagcttttgtcgtcgtaattgatgattaatgtcggggcgatggtggaaagctgatcatacagtgccagcgccgaatccccgccggttgcgctaattaaaatcagatccggcatttgcgcggcaacggcttcggcgctcggttcgccgatatagagccgttgcagtttgcgttctttcgccaccttgctccactggcgtaaaaagccctggtcatccgcgacgcggttattcggcgtggtcgcgccgctggcgatcaccggagcatcaatcgccagcagtgagccggtcagggtgacgctggtggaaacaatacgctgcggctggctttccagtgtatgtgtgccacggctgtcagtaatctgacgcggccagtcagcggcctgaactgcggctattcctgaaagcaaaagtcctgttaatagaagggcgttgcggtagagcggggcgagtctcacaaatcagcttcctgttattaataaggttaagggcgtaatgacaaattcgacaaagcgcacaatccgtcccctcgcccctttggggagaggttagggtgagggsagacagccagcactggtgcgaacattaaccctcaccccagccctcaccctggaagggagagggggcagaacggcgcaggacatcacattgcgcttatgcgaatccatcaataatgcttctcattttcattgtaaccacaaccagatgcaaccccgagttgcagattgcgttacctcaagagttgacatagtgcgcgtttgcttttaggttagcgaccgaaaatataaatgataatcattattaaagcctttatcattttgtggaggatgatatggatacgtcactggctgaggaagtacagcagaccatggcaacacttgcgcccaatcgctttttctttatgtcgccgtaccgcagttttacgacgtcaggatgtttcgcccgcttcgatgaaccggctgtgaacggggattcgcccgacagtcccttccagcaaaaactcgccgcgctgtttgccgatgccaaagcgcagggcatcaaaaatccggtgatggtcggggcgattcccttcgatccacgtcagccttcgtcgctgtatattcccgaatcctggcagtcgttctcccgccaggaaaaacagacctcagcccgccgttttacccgcagccagtcgctgaacgtggtggaacgccaggcaattcctgaacaaaccacgtttgaacagatggttgctcgcgccgccgcacttaccgccacgccgcaggtcgacaaagtggtgttgtcacgattgattgatatcaccactgacgccgccattgatagtggcgtattgctggaacggttgattgcgcaaaacccggttagttacaacttccatgtcccgctggctgatggtggcgtcctgctgggggccagcccggaactgctgctacgtaaagacggcgagcgttttagctccattccgttagccggttccgcgcgtcgtcagccggatgaagtgctcgatcgcgaagcgggtaatcgtctgctggcgtcagaaaaagatcgccatgaacatgaactggtgactcaggcgatgaaagaggtactgcgcgaacgcagtagtgagttacacgttccctcctctccacaattgattaccacgccgacgctgtggcatctcgcaactccctttgaaggtaaagcgaattcgcaagaaaacgcactgactctggcctgtctgctgcatccaacccccgcgctgagcggtttcccgcatcaggccgcgacccaggttattgctgaactggagccattcgaccgcgaactgtttggcggcattgtgggttggtgtgacagcgaaggtaacggcgaatgggtggtgaccatccgctgcgcgaagctgcgggaaaatcaggtgcgtctgtttgccggagcggggattgtgcctgcgtcgtcaccgttgggtgagtggcgcgaaacaggcgtcaaactttctaccatgttgaacgtttttggattgcattaaggagcgaggatgagcattccattcacccgctggccggaagagtttgcccgtcgctatcgggaaaaaggctactggcaggatttgccgctgaccgacattctgactcgccacgctgcgagtgacagcatcgcggttatcgacggcgagcgacagttgagttaccgggagctgaatcaggcggcggataacctcgcgtgtagtttacgccgtcagggcattaaacctggtgaaaccgcgctggtacaactgggtaacgtcgctgaattgtatattacctttttcgcgctgctgaaactgggcgttgcgccggtgctggcgctgttcagccatcagcgtagtgaactgaacgcctatgccagccagattgaacccgcattgctgattgccgatcgccaacatgcgctgtttagcggggatgatttcctcaatactttcgtcacagaacattcctccattcgcgtggtgcaactgcacaacgacagcggtgagcataacttgcaggatgcgattaaccatccggctgaggattttactgccacgccatcacctgctgatgaagtggcctatttccagctttccggcggcaccaccggcacaccgaaactgatcccgcgcactcataacgactactactacagcgtgcgtcgtagcgtcgagatttgtcagttcacacaacagacacgctacctgtgcgcgatcccggcggctcataactacgccatgagttcgccgggatcgctgggcgtctttcttgccggaggaacggttgttctggcggccgatcccagcgccacgctctgtttcccattgattgaaaaacatcaggttaacgttaccgcgctggtgccacccgcagtcagcctgtggttgcaggcgctgaccgaaggcgaaagccgggcgcagcttgcctcgctgaaactgttacaggtcggcggcgcacgtctttctgccacccttgcggcgcgtattcccgctgagattggctgtcagttgcagcaggtgtttggcatggcggaagggctggtgaactacacccgtcttgatgatagcgcggagaaaattatccatacccagggttacccaatgtgtccggacgatgaagtgtgggttgccgatgccgaaggaaatccactgccgcaaggggaagtcggacgcctgatgacgcgcgggccgtacaccttccgcggttattacaaaagtccgcagcacaatgccagcgcctttgatgccaacggtttttactgttccggcgatctgatctctattgatccagagggttacatcaccgtgcaggggcgcgagaaagatcagatcaaccgtggcggcgagaagatcgctgccgaagagatcgaaaacctgctgctgcgccatccggcagtgatctatgccgcactggtgagcatggaagatgagctgatgggcgaaaaaagctgcgcttatctggtggtaaaagagccgctgcgcgcggtgcaggtgcgtcgtttcctgcgtgaacagggtattgccgaatttaaattaccggatcgcgtggagtgtgtggattcacttccgctgacggcggtcgggaaagtcgataaaaaacaattacgtcagtggctggcgtcacgcgcatcagcctgaaggagagaacactatggctattccaaaattacaggcttacgcactgccggagtctcacgatattccgcagaataaagttgactgggcctttgaaccgcaacgtgccgcgttgttaatccatgatatgcaggactattttgtcagcttctggggcgagaactgcccgatgatggagcaggtgatcgcgaatattgctgcgctgcgcgactactgcaaacagcacaatatcccggtttattacaccgcccagccgaaagagcagagcgatgaagatcgggcgctgttgaatgatatgtgggggccgggcctgacccgttcgccggaacagcaaaaggtggtggatcgcctgacgccagatgccgacgacacggtgctggtgaagtggcgctacagcgcgtttcatcgttctccgctggagcaaatgctcaaagagagtggacgtaaccagctgattattaccggggtatatgcccacattggctgtatgaccaccgcaaccgacgcatttatgcgcgatattaaaccgtttatggtggcggatgcgctggccgatttcagccgtgacgagcatttgatgtcgctgaaatatgtggccgggcggtctggccgggtggtgatgactgaagaattactgccagcacctgtccccgccagcaaagcggcgctgcgtgaggttatcctgccgttgctggacgagtccgatgaaccgttcgatgacgacaacctgatcgactacggtctggattcggtgcgcatgatggcgctggcggcgcgctggcgcaaagtgcatggtgatatcgactttgtcatgctggcgaaaaacccgaccatcgacgcctggtggaagctactctcccgcgaggtgaaataatggatttcagcggtaaaaatgtctgggtaaccggcgcaggtaaaggtatcggctacgccacggcgctggcgtttgttgaggcgggagcgaaagttacaggttttgatcaagcgttcactcaggagcaatatccctttgcgaccgaagtaatggatgttgccgacgccgggcaggtggcgcaggtatgtcagcgactgttagctgaaacggagcgactggacgtgctgatcaatgcggcgggaattttgcgcatgggcgcgaccgatcagctcagtaaagaggactggcagcagacttttgcggttaacgtcggcggtgcgtttaacctgttccagcaaaccatgaaccagtttcgccgtcagcggggcggggcgattgtcactgtggcgtccgacgccgcacacacgccgcgtattggtatgagtgcttatggcgcatcgaaagcggcgctgaaaagcctggcgttgagcgtcgggctggaactggcgggtagcggcgtgcgctgtaatgtggtttcgcctggctccaccgacaccgatatgcaacgcacgctgtgggtgagcgatgacgccgaagaacagcgtattcgcggctttggcgagcagtttaaactcggcattccgctggggaaaatcgcccgtccacaagagatcgccaacacgattttgttcctcgcctctgacctcgccagccatatcaccctacaggatattgtggtcgatggcggctcaacgctgggggcataagcatgatctggaaacgccatttaacgctcgacgaactgaacgccaccagcgataacacaatggtggcgcatctgggaattgtgtatacccgtctgggagatgatgtgctggaagccgaaatgccggttgatacccgtactcatcagccgtttggcctgctgcatggcggcgcgtcggcggcgctggctgaaacgctgggatcgatggccggatttatgatgacccgtgacgggcagtgtgtggtgggtacggaacttaacgccacccatcatcgcccggtgtctgaaggcaaggtacgcggcgtctgccagccgctgcatcttgggcggcaaaatcagagctgggaaatcgtcgttttcgatgaacaggggcggcgttgctgcacttgtcggctgggtacggcagttttgggatgagcccgacagaattaaatgagattgcaggaaaactcggttaacggagtgatcgagttaacattgttaagttaaatattggtttcaactccgatttacatggttaccgtgttgttaaatcgtacaaagatgttatagaaacaaaatgtaacatctctatggacacgcacacggataacaactatgaacaaatcagggaaatacctcgtctggacagtgctctctgtaatgggagcatttgctctgggatacattgctttaaatcgtggggaacagatcaacgcgctgtggattgtggtggcgtcggtctgtatctatctgatcgcttaccgtttttatgggctgtatatcgccaaaaatgtgctggcggttgacccgacgcgtatgacgccagcggtgcgccataacgacgggctggactatgtgccgacggacaagaaagtgctgttcggtcaccattttgcggccattgccggagcaggtccgttggttgggccggtactggcggcgcaaatgggttacctgccagggatgatctggctgctcgccggggtggttctcgctggtgcggtgcaggatttcatggtgctgtttgtttctacgcgccgtgacggtcgatcgctgggtgagctggtcaaagaagagatggggccaactgccggggtgattgcgctggtagcctgctttatgatcatggtcattatccttgcagtactggcgatgatcgtggtgaaagccctgactcatagcccgtggggaacgtataccgttgcgttcaccattccgctggcgatttttatgggaatctacctgcgctatctgcgtccgggccgcattggcgaagtgtcagtgattggcctggtgttcctgattttcgccattatctctggcggctgggtggcagaaagtccgacctgggcaccgtactttgactttaccggcgtgcagctgacctggatgctggtgggctacggttttgtggcggcggtgctgccggtgtggttgctgctggccccgcgtgactatctctcgaccttcctgaaaatcgggactatcgtcggtctggcggtaggcattttgattatgcgcccgacgctgaccatgcctgcgctgaccaaatttgtcgatggcactggcccggtatggaccggtaacctgttcccgttcctgtttatcaccatcgcctgtggtgcggtgtctggcttccatgcgctgatctcttccggcaccacgccgaagatgctggcgaacgaagggcaggcgtgctttatcggctacggtgggatgttgatggaatccttcgtggcgattatggcgctggtttctgcctgtatcatcgatccgggcgtgtattttgccatgaacagcccaatggcggtgctggctccggcagggacggcggatgtagtcgcttctgccgcgcaggtggtgagtagctggggctttagcattacaccagatacgctcaaccagattgccagcgaagtgggtgaacagtcgatcatttcccgtgcgggcggtgcgccgacgctggcggtggggatggcttacatcctgcacggtgcgctgggtggtatgatggatgtggcgttctggtatcacttcgccattctgtttgaagctctgtttattctgacggcggtagatgcgggtacgcgtgctgcgcgctttatgttgcaggatctgctgggcgtggtttctccgggcctgaagcggaccgattcactgcctgctaacctgctggcaacagcgctgtgcgtactggcgtggggctacttcctccatcagggcgtggtcgatccgctgggcggcattaacactctgtggccgctgtttggtattgccaaccagatgctggcagggatggcgctgatgctctgtgccgtggtgttgttcaagatgaaacgtcaacgttacgcctgggtggcgctggtaccaacggcctggctgctgatttgtaccctgaccgcaggctggcagaaagcgtttagcccggatgcgaaagtcggcttcctggccattgctaataagttccaggcaatgatcgacagcggcaatattccgtcgcagtatactgagtcacagctggcgcaactggtgttcaacaaccgtctggatgccgggttaaccatcttctttatggtggtcgtggtggttctggcgctgttctcgattaagacggcactggcggcattgaaagatccgaagccaacggcgaaagaaacgccgtatgagccaatgccggaaaatgtcgaggagatcgtggcgcaggcaaaaggcgcacactaaagtcagagtgaggggggatgttggcgaatgttggcatagtgccgagggttcctcctcaccctaaccctctccccgatggggcgaggggactgaccgagcgcgttgatagcatttgtaggccggataaggcgttcacgccgcatccggcactctttcagcaacatggttagcggaggccaagatgtttgattcactggcaaaagccggaaaatatttaggtcaggcggcgaagctgatgattggtatgcctgattacgacaactatgtcgaacatatgcgggttaaccatcccgatcaaacgccgatgacctacgaagagtttttccgtgagcggcaggacgcgcgctacggtggaaaaggcggcgcgcgctgctgctaaatttgcacgtcaggctttaaacgattccactttttcgaacgctgcacgcaacgtatctggtgtcagcgtgactggcaggtaatgaatggattccaccggacgcagggtgtgggtaatcactttgtcgatctccgcatgattattgatatccacttccagctccgccagcgtggtcggcagatgaaaacgctgatacgccccggttaattgcgccagcacatcatcctgactcagcaaggcgctttgtaccagaatgccataagcgactttggtgccgtggagaaatttctcggtttgcggcaggacagtcagaccgttatgcacggcatgagccgccgccacacgcgtaaaacgatcgcccagaccaccgaccatcccaccaccagcaataatagcatccaccacatcgcaaaatgattgcgttaactgttgattttgctgatcgctcagcgcctgttcgctactgtttaacaatacgtcgcgaatggcctgcgcattattgatccccagtcgcacggttagcggcaacgtttctggttgcggagccagcaccaccgcttcataccatttcgccagcgtgtcaccgatccccgccagcagatattgttgcggtgcattgaggataatctccggttccaccagcaccataaaattggcgtcgtcgaaaatctcataatgcagcgcctgtccggcatcgttataccagacggagagcggtgtccaggctgcgcaggtggcggcgatcgtcggagcggcaacaaatggcagaccgagacggcgggcgagggctttcgcggtgtcgagcagtgcgccgccgccgacgccaatcaccacgctgcgatcgtcaccggactcagccgccagttgctgtacatcgctttcgctgcaatgaccacgaaacaaaatatgctttgcccctggaagtccaaacgctggcggaagtttggtttgcgccgcagcaatggcgcgtttgccgtagatccacaccgcgcgagaaagttgttcatcagtgaaaaaatcgtgcaggtgattgaaacttcctggatgtgaaaagtagttagccgggccgacgaccacgcggataggattgtgaggcatgttgtgttgtccttattgttttatttagacatctaaacgtcttgattgccaaatactagcatcgtgttatagtgccttcaacacgcaacttcgtcaggtacaataaaaatgacaaataaccctctgattccacaaagcaaacttccacaacttggcaccactattttcacccagatgagcgcgctggcgcagcaacaccaggcgattaacctgtcgcaaggctttcctgattttgatggtccgcgctatttacaggagcggctggcgtaccacgttgcccagggggcaaaccaatacgcgcccatgaccggcgtgcaggccttgcgcgaggcgattgctcagaaaacggaacgtttgtatggctatcaaccagatgccgatagcgatatcaccgtaacggcaggggcgacggaagcgttatacgcggcgattaccgcactggtgcgcaatggcgatgaagtgatttgttttgatcccagctatgacagttactcccccgccatcgcgctttctgggggaatagtgaagcgtatggcactgcaaccaccgcattttcgcgttgactggcaggaatttgccgcattgttaagcgagcgcaccagactggtgatcctcaacactccgcataaccccagtgcaactgtctggcagcaggctgatttcgccgctttgtggcaggcgatcgccgggcacgagatttttgtcattagcgatgaagtctacgagcacatcaacttttcacaacagggccatgccagtgtgctggcgcatccgcagctgcgtgagcgggcagtggcggtttcttcatttggcaagacctatcatatgaccggctggaaagtgggttattgtgttgcgccagcgcccatcagcgccgaaattcgcaaggtacatcagtatctgaccttttcggtgaataccccggcacagctggcgcttgctgatatgctacgtgcagaacctgagcattatcttgcgttaccggacttttatcgccagaagcgcgatattctggtgaatgctttaaatgaaagccggctggagattttaccgtgtgaaggtacatactttttgctggtggattacagcgccgtatctaccctggatgatgttgagttttgccagtggctgacgcaggagcacggcgtagcggcgattccgctatcggtgttttgcgccgatcccttccctcataaactgattcgtctctgttttgccaagaaggaatcgacgttgctggcagcagctgaacgactgcgccagctgtagttatttgacagtccaggcgcgggaatattgacggtcggcaaacagctcttgcagaccgttaatttgcttcaggcgcagcacttcgtcgctgtccattcccagctctttgccaattttattatcgtcccatcccaactggctaagttcacggacgatttccgacatggcggtgatttgatggcgtccacgagcgcgattatgacgaatagtcgcggcgatgcgttgattacgcgtaccttccagacaggtcaccggcaaataaccttttaagcgtaattttaatgatgatgagcctttaccaatttcatggcggtgaaaaccatccacgatttccagggcatttttatccgtatgcgtgaccacaatgggttgggtaaaaccatctatttcaatggattttttcagcagttttttttcgggtggtgccacgttgtttgggttgtaatcattaggcataagttggctgtttttaacccacagaacgcaatccactggctcttcacgaaaggggctaacctgatggatcgccatgcggatttcattaatcgcgttgatgcgatcatcttccggcaagctggcgagaaattgcgttaaatcctgcgttaatcgttgttgcatagtatcccccattcctgacgttttccttttatccgttcgttataacgctgatagttcttcgctttcgtaggactaaatgataatgcccgacaccagtaatcgttattgagtaaaactttgcatatccgccgccaggaggggatatctttcgcgccaatgtccccttgctgggtttgtggaacctcgatgccttttttctgataccagtgcaaataaatggcgattttattgcggtaatgctcagctgttttttccggcatgctattgagcagcaataatgcatattcttgccagtctaaatgttctggcttgaggattttccgatgcccatagaaatgattgtcatgtccggcgtaaatgccgccactttttaccccgctgactcgtgcgcacatagcagcccagcgatccggttcgataacgtgatagagccataatccttgtcgttgctccgggccaaaaggttcgcaaattcgcatatgacgcagaggaacgcctgcctgatacattaggttatacagtgggttgcagagactttgatgatttgcataccaggtccagatatcagccactttccagtcgtaaatggggtaaatgtaccagctatgaccgcctggtgcggccgtagtccagggtttatcgtcggcaaaacgttgtttatttaaactggcgatggcgacaaaacggttgtaggactcatccgcacggatgccgatcatcatcgccgccggacgtttttgtgaaaaccattcggcaaactcacgtacaaattgttcgaaggtcatgcctggctggtaaaagcagaaaaagtcaggatcggttatcgcatcttgcgggggctgacgcacccattcgacatcaggttcccagcactgccattcgggttggtattgtgaaagggaattttgcgtcgtaagcgggagcgcaacccagtaaaactcttcgatgacatcggtgtacaactcgcgcagggactgaacatagttaatggtgcaagagaattgcgcctcccagtcgataaacaaaacgcagatttttttgcccatttgtcgggcaagttcggctgtcagatgcagcattaaaccagagtctttgccgccagaaaatgagacacaaacgcggggtagggtgttgagtgtccaggtaatacgctctcgtgcagcttccagaatattgagcggaagaggaattttataaatagacatctgaagacgctctctgaacgttacagggtgaacagtgagataagactgttaattataaagtaaacactgtaaagcagagtgttttatttttcattcgcgctgtgaataaatagatgaaagttatagtagctgtctgtagttatatatcaaaaactctcatttagacggtcaataaatcgggagaacaccaaattatttaaagaagatttattataggaaatgtaaagctttattgaaggtaacggatgttctagttttatctcttttaaattaagaaagtcacggtaggaattataaagttcataggggactattcccagtaaatctgtaactgcaatgctattaatgattgtcagcaaagaggaaccacgaaatgagattttgcgattcataaatctctcgtctatttccatttgaatatcatcaactcctgctgatttggatattaattgggtgaactcttctgccataatttgttcataagtgctattgtcagtaattcgcggatgcttattactacaaattagagtattgcgaattgtatgcaatggcatgcaaatgacggaacggctgatcactggcatttgggtgatcaccagatcggctttgcggtgaaccaacagttcttcagcattctctgctgacatgaggatatcatggcactcaatctcgacagaggcatcttgccgtaggcagcggatcagcatactattattagagcaagaaatgagctgagggccgtagataataaagtttttctttagttcggacttattgactatattaattgtttgttcaaggcctttgaggtttttctcaagatggtgatgcagattcaaccctgttgtcgtcggcgcgataccttttcctgagcgaatgaataaagggtcattaaattgcgcacgtaagcgttgtaacgactggctcacggctgatggggtgatatatagtgattcagcagctttgctaatgcttaaatgctggtaaatacactcaaatatgacaagaaggtttaagtcgaactttttcaagtcgtagagattggccatacactactccggttatatttttcttccatggtatattcacttaatcaatgttttttgcgtatatatttttattgattatatttttttgcttaactcaggattaagtttttctaaaatagcatagccacttagggcagagcgagcaattcatgcttttttaggatggttgaaaagcagagatgtatttcaaccatccatgaattatcttttatttattccccataatgatattaagcgttttctgatcgggcaaccccacggcctgttgtagcgtattttccttactcatgtaatagatagccggcgtgacatttgcccccagatcgtccatcagtttctcattgtcacttaacactttcatttgctctgtacttacgtttgcaggcacgtttagcttaagcttgccaccagaggcttcatattgttgccaggtttttgcgggatctttggaggcaagaattgccgctgctgtcgccgggctttctggcttgataaccccaaccaacaatgttcttaattgcactttgccagaatctacccacgggcgcgcctgctgccagaactgtttacaatatgggcagaacggatcggcgaagacgtagacaatgaccggcgcatcttttttaccgtcgaggagccagtgggattgttccatccgttgccacatttcgcgtccggctggtgcgtaaatttctttttcgataagtgtgttactcaggttttcacctttctcgttgtacatgtaaccagagatagcgtgcttaccatctggagtcaggtagatggtgacgcccatatcctgatactttccgagataacctttcattcctccgggggcatcgaatgttttgatgattgtaatgccctgtttttcaatcgcttttactggagcaggaagttcctctgcgaaggcgattgcaggaagcagagccagtaaaagtatcttttttaacattaatttgtccttttcagtcagtgcaaaagtcgagtaaaaggcataacctatcactgtcataggtaagagcttagatcaggtgattgccctttgtttatgagggtgttgtaatccatgtcgttgttgcatttgtaagggcaacacctcagcctgcaggcaggcactgaagataccaaagggtagttcagattacacggtcacctggaaagggggccattttactttttatcgccgctggcggtgcaaagttcacaaagttgtcttacgaaggttgtaaggtaaaacttatcgatttgataatggaaacgcattagccgaatcggcaaaaattggttaccttacatctcatcgaaaacacggaggaagtatagatgtccttgattaacaccaaaattaaaccttttaaaaaccaggcattcaaaaacggcgaattcatcgaaatcaccgaaaaagataccgaaggccgctggagcgtcttcttcttctacccggctgactttactttcgtatgcccgaccgaactgggtgacgttgctgaccactacgaagaactgcagaaactgggcgtagacgtatacgcagtatctaccgatactcacttcacccacaaagcatggcacagcagctctgaaaccatcgctaaaatcaaatatgcgatgatcggcgacccgactggcgccctgacccgtaacttcgacaacatgcgtgaagatgaaggtctggctgaccgtgcgaccttcgttgttgacccgcagggtatcatccaggcaatcgaagttaccgctgaaggcattggccgtgacgcgtctgacctgctgcgtaaaatcaaagcagcacagtacgtagcttctcacccaggtgaagtttgcccggctaaatggaaagaaggtgaagcaactctggctccgtctctggacctggttggtaaaatctaagttccgcaatcgcgtaattaatcgggtgctgcggcacccgattttcttccccgcaccatgatgcaagctgcatccaggtagccgcagaggccgcttgcatgatgatgtttaaagcccaggagataaacatgctcgacacaaatatgaaaactcaactcaaggcttaccttgagaaattgaccaagcctgttgagttaattgccacgctggatgacagcgctaaatcggcagaaatcaaggaactgttggctgaaatcgcagaactgtcagacaaagtcacctttaaagaagataacagcttgccggtgcgtaagccgtctttcctgatcaccaacccaggttccaaccaggggccacgttttgcaggctccccgctgggccacgagttcacctcgctggtactggcgttgctatggaccggtggtcatccgtcgaaagaagcgcagtctctactggagcagattcgccatattgacggtgattttgaattcgaaacctattactcgctctcttgccataactgcccggacgtggtgcaggcgctgaacctgatgagcgtactgaacccgcgcatcaagcacactgcaattgacggcggcaccttccagaacgaaatcaccgatcgcaacgtgatgggcgttccggcagtgttcgtaaacgggaaagagtttggtcagggccgcatgacgttgactgaaatcgttgccaaaattgatacgggcgcggaaaaacgtgcggcagaagagctgaacaagcgtgatgcttatgacgtattaatcgttggttccggcccggcgggtgcagctgcagcaatttactccgcacgtaaaggcatccgtaccggtctgatgggcgaacgttttggtggtcagatcctcgataccgttgatatcgaaaactacatttctgtaccgaagactgaagggcagaagctggcaggcgcactgaaagttcacgttgatgaatacgacgttgatgtgatcgacagccagagcgccagcaaactgatcccagcagcagttgaaggtggtctgcatcagattgaaacagcttctggcgcggtactgaaagcacgcagcattatcgtggcgaccggtgcaaaatggcgcaacatgaacgttcctggcgaagatcagtatcgcaccaaaggcgtgacctactgcccgcactgcgacggcccgctgtttaaaggcaaacgcgtagcggttatcggcggcggtaactccggcgtggaagcggcaattgacctggcgggtatcgttgagcacgtaactctgctcgaatttgcgccagaaatgaaagccgaccaggttctgcaggacaaactgcgcagcctgaaaaacgtcgacattattctgaatgcgcaaaccacggaagtgaaaggcgacggcagcaaagtcgttggtctggaatatcgagatcgtgtcagcggcgatattcacaacatcgaactggccggtattttcgtccagattggtctgctgccgaacaccaactggctggaaggcgcagtcgaacgtaaccgcatgggtgagattatcattgatgcgaaatgcgaaaccaacgtcaaaggcgtattcgcagcgggtgactgtacgacggttccgtacaagcagatcatcatcgccactggcgaaggtgccaaagcctctctgagtgcttttgactacctgattcgcaccaaaactgcataagaagaagtaagattcacctgcaattgcttagccgccggggtcaaacctggcggcttttttatggcattaaaaagccctgccgggatggctccgggcagggcgggatatttattctggcaattaacgcacaaccagcaccggcagattggcatggcggatcacgctcgaggcgttagaacctaacagatgggtcgaaatcgatgggttgcgagaaccaataactacaacatcagcccccagttcttctgccaactcattgacttcatcccgcacgctaccaaaacggacatgttgtttaatgcgggaaggatcgatggtgaagtggctgaccatcgtttgcagacgttcttctgcttcatgttgcagatgctcttcaaaacgacgcacatcagcggcaaaacggtgcaggctcaggctggctgacccgggtagtacgtgaagtagatgaataactccgtcatcctgggcgaggaattcagcgtggcgaacagctttgtcgctcaattccatttcaaatacatcaactggcataatgattgtcttatacataaccctttctccctgttaatcatgaacaaatcattcgccatgattataatatttatccctgatatttgtctggttctttttccttacgaacggtttctgtgattaatatattctcactgaacaccaggaattctcccaaaacctgcggtaccgcccgttttcccgctgtgatagctacccttaaagactgactcttttttgaactgtctctggaggttgcatgaaagcattgacttatcacggcccacatcacgttcaggtagaaaatgttcccgatccgggcattgaacaggcagatgatattattctgcgtattacggcaacggcgatctgtggctctgacctccatctttatcgaggcaaaataccccaggttaaacatggcgatatttttggtcatgaatttatgggggaagtcgttgaaaccggaaaggacgtaaaaaatttgcaaaaaggcgaccgggtggtaattccgtttgtcattgcttgtggcgactgttttttctgtcgattacagcaatatgccgcctgcgaaaataccaatgcgggtaaaggcgctgcgctcaataaaaaacagataccagctcccgcggcattgtttggttatagtcacctgtatggcggcgttcctggtgggcaggcggaatatgtccgcgtccctaaagggaatgtggggccgtttaaagtaccgcctttgctttcagatgataaagcccttttcctttctgatattctgccaacggcatggcaggcagcaaaaaatgcgcagatccaacaaggttcaagcgttgcagtctatggtgccggtccagtgggattgttgacaatcgcctgtgcacggttgctcggtgcggaacagatttttgttgttgatcatcatccctaccgcttgcgtttcgccgctgaccgctacggcgcgatcccgattaatttcgatgaagatagcgatccggcacagtcaattattgaacaaacggcaggtcaccggggcgtggatgcagtaatagacgccgtcggttttgaagcgaaaggcagcaccacggaaacggtgctgactaacctgaaactggagggcagcagcggtaaagcgttgcgccagtgtattgcggcggtcaggcgtggcggcattgttagcgtaccgggcgtctacgctggatttattcacggtttcctgtttggcgacgcctttgataaagggttgacgtttaaaatgggacagacccacgttcacgcatggctgggagaattattaccgttaattgagaaaggattactgaaaccagaagaaattgttacccactatatgccgtttgaagaggccgcccggggatatgagattttcgaaaaacgtgaagaggagtgccgtaaggtgattctggtacccggtgcacaaagcgcagaggcggcgcagaaggcggtttcaggtctggtgaatgcgatgccggggggaacaatatgatcgtcaggagtggttttcgaggtaaaggacagccatgacgataatcgccgccataatcagaaatcctatcaggatgtaaaatgcttctgccatggttattcccacaaacgaaacggaataattttgcagcaaaagtgaacagtgagaaccaggaaaaattgctgattttgcgtaaagaggatgcgcgtgcatcctctgggcaaagcgagttatcgcttgtgcagatgggattaaagcaggtagtcgccagcagcttctggctggtattcgagttccagcacttcaaggtgggttgcaacgccgcccggaagttcccagtgaatggaatcgccaacgcgcagccccagcagtgcggcacctaccggagccataacggaaagctgagtattgctatcggtcatttttgccggatacaccagcgtgcgcacacgcacttcgccatcgctaagattgcggaatttaacccggctgttcattgtcaccacgtcgtgtggcatctcttctggcgaacacatttgggcgcgatccaactctgcgtttaacgcgtcggcgattggcaaaccagcataggcgggttgctccagcagaatatcgatgcgttcggcatccaggtcgttaatgatgatagttggtctggacatttttactccatgtcgtcggtactgcgagtgtcgcagataaacatacccaaaagaaaaccctcaccgtcaggcggcgagggtttaactcacatgatgatactgactgttgctcactctttgaagtgatttgcgtcacattcagggaattcctcaatgcagcgcattatgtataattcttaatcgtcacggtttatggaagacgaattagcgtgttttgtaaatcagatgattaataacccactttatcaatcacaaaggttttgccacagttgcctgggtgtggttgtggcaagaatgagtttgcagaaagcggagcgttgatggcgtcagctttgatcgagatctgaatttcagtcaaatacgcagggttaccctggcacgttagcttaactgctttcacgttctcttttccccagcttttggcaaaggcggcgtcaaagtcacggcggctcactgttttaccgtaattatccgcaaggaattttccggcttcgctctctttaatttcttgattcaggcgtaccatcgtaccgaagtatgcgtccggatcaaaaccaaagcaggcaccgtgtttggcatattcgtagcgttccaggcaggaacgtccgccagctcctggcatgacttcacttagtttagcggccgtttccagtgataatccggtttccggcgatgaacacattcggctggcgcgcgcttctggtagattcgggattgggcgagtagcgcaaccgaagcgcatccagcggcgttcatcaacaccacgggcagcaaccgatttaggcaatcctggccacagaccatgtacggtcagaaaatcagctttgttggtcgtttcggtttgcaggcgacattcatctcgttcgttacgatttcgatcgtgttgactctggcaaaatccggtttgccaggagagggccaggacatagcgatcaaaatcgccatactgttttgcctgcaacgctacggcgttggcagaagagaagggaagcagagaaaccgcgagcaacgcggcgttacgccagaatgctttcataatgggtgtggaactcatacatacactgaatactatctattaaatcataaaaaagcccgccaggtgggctaacctggcgggcgtgatgatttattcagcgtttggcgaacgtattagttccacatggcgagaatcggccagccaaccaacagcaacatagagatgtaaatcaccccgaagattgcgccaagacgccagtaatcttttgatttcacatagccacagccgtaaataatcaccccaggaccggttgcatacggcgtcagacagcccatgataccgatagacagcaccagcaggatacacagttgttccattggtacgcccggaatacctttaccgacggccagaataaccggcagcatggttgcggtgtgcgcagacaggctggcaaacaggtagtgtgcaaagtagaacaccagaaccagtacaatcaccgttgcgtttggtgagaatccttccaggtgcgtactcatggtaccggcgaaccagtcaataaagccagaacgagtcaggccgttagccatcacaaccagagttgccaggttgaccagcgtgttccatgcgctgttatagcgggtaatatctttccaaggcacaacgtgcagggccagcattagcgaaactgccagcagaccaactgcagtagcattaatgacttcactgccaaaaacccacaaacctaagctgagcaatacaaggccaatcagtgtccactctctgcgtgtcagcgcacccatggttttcagttcatcacccgcccaggttgccacttcttcactgtgtgtgatttccggtttgtacagcacgtaggaaagccacggcgcaatgataagcaagataaccccaaccggcaggaagcagaggaaccactgcaaccagctaatctggataccggcaattttgctgacgaactccagacccagcacgtttggtgccgcaccggtgacaaacatggacgaactcagactggtactaatgaccatcatccacatcaaatagccgccaatacgacgcgcggacggatcgttggggaatgatttaaacaacggcggcaggtttttaatgaccggaaaaaccgtacccccggtacgcgcggtgttggacggtgtaaacggtgccagcagaatgtcgataatgacaatcgcataacccaacgtcagcgtgcgtttgcccatgaatttcaccaggaaaagggcaatgcgacgacctaacccggaaacttcataccctaatgcaaaaataaatgcgccaaataccagccataccgtggtgctggaaaaaccagccagaccccatttcagcgcctgtttttgcgcattaaacgctgggtcagctaattctttggcatcaaagagcaggtaattactgccaataacgcaaatagtaaccgcaataaaactgatcgctgttgccggaattggctcgaggatcatgccgacaatcattgccacaaacacagcgaagtaatgccatgcctgtggtggcataccgtcggggacagggataagaaacatgacacccatcaccaccagtggggccaatagtttccatatattatcttttgctaaagacatacgggttctccgaaaattaatattttcaaatttatcaagtgcttaaataattaaatctgtgctaaaaaccaggtaaggatcagcaggtcggcactgccgcctggactgagatttcgttcgatacactccctgtcgaactgccggagataatcgagatcggcgggggttcgaatgccccctttttgcaataatgtttgcgcctcgcgctgtagccagcgcaggcccccctcgccaccgcgcgaagcaacgttggtatcgccgttgatcgccatcagtaggagcaaggtatcgagcaatgccagttcaggatctaacccctgatccagcagagtgaggtaatgcggcaaggcgtggttgatcaccagtggataacccgcttcggcttcaccgcgtgcgccggtaaggccaagctgctggtacaaccgttgacctgccgtcagttgtgaattattggtacgcagttcgcgatcggtcagaccacggcagaaacttgccgccgtagaacaaacggttgttggcgttaccggctggttgagctgaagcaaacggccaattgccgcacatagcagccctaaagaaaaaatgctgcctttatgcgtgtttacgcccgcagtggcgcggaacatatcaccttcgcaagccataccaattgggcgtaatccgtggagtaccgcttccggtgccatttctgcactacaggcaccaaattcaatgaaacggggtaaccagccctgaatcgccagcgcgctgcggtggaaatcttccagcgccatatctttgtgcgcaccgcagttaatgcgatccacgaggcctggtttcggtgacagattgacttcagtcagcatggcgcgccagcccagcagggcgtactcatcgattaatgacgtcgcaagctttgtggttttagttgacgttgcaggcatcgacatcgttcagcagtgcctccatgcggttgagtaaatcggtcagttgatgggtttttccacgcgcgcagacggctgcgctttgctcgcacaacaggcagcggcgaggcggcagtgaatagtcgcggcgggagagaatttcgccttcgggcgtcaggacatcgatatcccataaccgcccgagaggatgactatgttcaagctcaatggtggcgagcttgaggtcgcgagccggggcggcaatgctcaacatgccctccggcccgctggcggaaaccagtgcagcctgctcctgaatttgccagccctgttttgcggctaaggcacgcaaggctgtcacgccatgattaaaaattcggcgtgtgacctcgctgtctttaatcggcccaggcgcaaccacggtaaaggagaccagtggaacaggatggcgcttgagccagacgtgttgccgtgcttgcctttcatcccggctgacgagcagctcgggaattgacaccgcatggtggctggcgagttcaggaagcaggtgcatggcttattccttcacctgatgcacaacatcgatcaccgagccatcgcggtaacgcacaacggcaacgacgcggtcggtgaattcaatcggctgtggttcaccggtcagcagacgcgcacgttcgcgcagccactcaatggaaaccactttaatgcccgcttcctgcagacgttctgccagttccggacgtgccgggttaactgcgataccgtggtctgtgaccagaatatcgacactggagcccggggtgatgcaggtcagcacgttatccaccagagtcggaatacgaccgcgtaccagcggcgcgacgatgatggaaagcgcagaggcaatcgcggtatcgcagtgaccaccggaagcaccacgcagtacgccgtcagagccggtcagcacgttaacgttgaactgggtgtcaatttccagcgcgctcagtaccaccacgtcgagacgatcaaccgatgcgcctttcgaaccccagttagcgtactggttggcgctgatttcgatgtgattggggttacgggccagcgattgcgcagcatggctgtcaaagctctgcacatccagcagtttgcggatcagacctttttcgtgcaggtcaaccatcgtcgcggtaataccgccaagggcgaagtcggcgcgaatatcgcggctacgcattttgtcttccaggaaacgggttaccgccagcgatgcgccgccggtgccggtttgcatggagaaaccttctttgaagtagcctgagttgacaatcacatccgcagcgctacgggcaataagcagttcgcgcgggttagtggtcatacgggtcgcgccagcgccgatttttgcagcatcgccaacgcggtcaactttgacgatcaaatcaacctgatcttgctcaatgcttgccggattatgcggataaggcagcagttcttcggtaagcatcacgacctgctttgcgttgtcggcatcaaccattgcatagccgagggagccgcagcaggctttaccggtgtagccgttggcattaccgaattcatcgcaggacgggacgccgaggaaagccacgtcgatattcagttcgccgctctgtaccagatgcacgcgaccgccgtgagagtggatttgcaccggttctgccagcagaccacgggagatctcttccgccagtggaccgcgcaggccggaggtataaatgcgggtaaccacgccctggcgaatgtgttctaccaacggcgcatggcaatcactcagggagctggacgccagggtcaggtttttaaagcccatcttcgcgatgacgtccatcaccatattgacggtcaggtcaccgccacggaaagcgtgatggaaggaaaccgtcatgccgtcctgtaaaccagagcgacgaatcgcttcttccaggttggcgcacagtttgcgatcgcgcgctttttcagcctggtaggtttgctttggcgagttctggaaagcggcaagatcgcattcagcgcgacgattccaggccgctacccgttcttgtcgttgagattgttcaattttctgcgtcattttgattgccttattcttcgcggatgccggaaagttctgcacgagagagcaccagacgggcgcgatcgataaccggaccgtccaccatcttgccgttcagggaaaccacgccgaggccttcgcgagcggcggcttcagcggcttctacgacgcggcgggcgtgatccacttctttctgggttggtgcgtagaggttgtgcaacagatcaatctgacgcgggttgatcagcgatttgccgtcaaagcccagctgtttgatgtgggcggcttcttgcaggaatccggcttcgttgttagcgtcggaatagacggtatcgaacgcctgaatacccgcagagcgcgcggcctgcaaaatggaacagcgtgcgaacagcagttcagttccttccggggagcgttctgtacgcaggttgcgcacatagtcttctgcaccgagggcgataccgatcaaacgctcggaagcgtgagcgatttccactgcgcgggtaatgcccagcggagattcaatcgccgccagcaggccggtgctgccgggttcacgaccacaggctttttcgatacgcaggatctctttttcaatatccagaacatcctgagcggtatcggttttcggcagacgcacaacgtccgcaccaccgcgaacgacggcttccaggtcgttaacaccccattcggaatccagcgcgttgacacgcacaatggtttcaatatcgcgatacagcggatgttgcagcgcgtgataaaccatgcggcgggcggtgtctttttcacgtaatgccacggagtcttcgaggtcaaacatcagggcatcagtcgggtagatgaaggagttgctgaccatcgcggcattggcaccaggcacaaacaacatgctgcggcgggtgcgagttttacgttgttgcagcgaagcggaaatcattggcaatcctcccatggcagagccgggataccgctggcgcgtgccagcagggcttccagtcgtgcacgtaaaatgcagtccagtgcgcctttgtcatcgacattcagctgtacgccgcgcacgttgtagcgggcgagaacgtccagaatggtggtgcgaattgcatcgccaaactgtttctcaacgctgctattgatttgcaggtcgatatcctgcgtatcgagtggggcgatgcgtatcatcacatccccagactcaagggtgcctgcaacggcgggctggtttattttcatttttcacctgtttctcatgcgggggtcttttgacgagctgccgcgtcctggcgggagtgctcaagcaggttctgcaaataatgcagcgtgactgcagggaccagcggcgcgatagccgtgagatcgtttttcgccagcagttgacgtacccgggaagcggatatcggcatctcctggtaacgcagccgctcaatttcaaccagttcgatgggcggtgcggagatagtcggcgtttccagccagtagcgcatatcctggttgtactgggcggtaacgcgacaaaagggttcagtaccgacaaagcggtgagttacacccagcgcgggagcgaggtactgacggaaaatcttcagatcaatttcggtgtaacaatggttaatgacgctctgttctttaatgaagtagcaagggaacgtagcgcgggagatgatgtattcggagccgcgatgcacagtcaggcgtggaatatcggcggtgccttttaacaccagatccaaccggtcttcataggggaagcgtgaagaatcttctttgactaaaaacagatgcaaccagtcgcactgtgccgcagcttgttgaatcagataacggtgaccattcgtgaagggattggcgttcatcacaatgcagccaatcttgttccctggatgacgaaattttttcagcgattcggcatagcgtttcagtcgcgtggcgctgttttccatcagcaccatcacgccgggtacgctggtcagcgtggaaaaaccgcactggcggaacagcgcctcgtattcggttttggtataaataaacagatgcgtgctgtgccgctcataggcgaggtttatcagttcagtggctaatgtcagcgccagtccttcaccgcgaacggattcactgatcgcaacgcatttaataatatttccggcaattccaccgcacgcgataagcttttcatcgcgggttacggtaataaatacttcgactgtggtgtcaacgctcaaatcattttcatgcaggaattgggcgatttccgccatttttttattttctgaacgttttacgcgggtgaaaatatcattgccgaacataataaatagtatcctgaaggtgcatgttgttatcgatttgcaacgaatgttgttcaatgttgcaaactgataaccttttattttcacttgggagaaaggggggtgatcgaggtatatctttttctcctttcgctatacatcctaaggagtatttctgcgtgaaattttgatttatttcacatagagttagtggttttttatttatttaatggttttaagttttttaattaatgtaattacgaaatgacctgcaggtttaagtgatttaattgatttaatgaataaaatttgccacgatcataattaatatctatgtattttgattcaacattttaattacatccgtcaaagaggctcgggacaacccgtaaggaaaacaatgttgcagcttaacgagaataaacagtttgcatttttccaaagactggcatttccgctgcgtatctttttgctgattctggtgttctcaatatttgtcattgcagccctggcgcaatattttacggccagttttgaggactatttaacgcttcatgtacgcgacatggcaatgaatcaggcgaaaattattgcctccaatgacagtgtcatctctgcggtgaaaacgcgtgactacaaacggctggcgaccatcgctaacaaattacaaagagataccgattttgattatgtggtgattggggaccggcactcgatccgcctttaccatcctaatccggagaaaattggttatcctatgcagttcaccaaacagggcgcgctggagaaaggggagagctacttcattaccgggaaagggtcaatggggatggcgatgcgcgccaaaacgccaatctttgatgacgatggaaaagtcatcggcgtggtgtcgattggctacctggtgagtaaaatcgatagctggcgggctgagtttttattaccgatggcaggcgtgtttgtcgtgctgttagggattctgatgttgctgtcgtggttcctggcagcgcatatccgtcggcaaatgatgggcatggagccaaagcaaatcgcacgcgtggtccgtcagcaagaggcgctgtttagttcggtttatgaagggctgattgcggtggatccgcatggttacattaccgccatcaatcgtaacgcaagaaagatgctggggctgagctctcccggacggcaatggttgggtaaacccattgctgaagtggtcaggcccgccgatttctttaccgaacagattgatgaaaaacgtcaggatgtggtggctaactttaacggtctgagcgttattgccaatcgggaagctattcgttcaggtgatgatttgctgggggccattatcagctttcgtagtaaagacgaaatttccaccctcaatgcgcaactgacgcaaataaaacaatacgtcgagagccttcgtacattgcgacacgagcatctcaattggatgtcgacgctcaatggtctgttgcagatgaaagagtatgatcgcgtgctggcgatggtgcagggggagtctcaggcccagcaacagcttattgacagcctgcgtgaggcgtttgccgatcgccaggtggcggggctgctttttggtaaagtgcagcgcgcccgggaactggggctaaaaatgatcattgtccccggtagccagctttcgcaactgccgccaggactggatagcaccgagtttgcagccattgtgggcaatttacttgataacgccttcgaagccagcctgcgtagcgatgaaggaaacaagatcgttgaattattcctcagcgatgaaggcgatgatgtggtgattgaagtcgccgatcagggctgcggcgttccagagtctctacgagacaaaatatttgagcagggggtcagtacgcgtgctgacgagcccggtgaacatggcattgggttgtacttgattgccagctacgtaacgcgctgcggtggtgttatcactctcgaagataatgatccctgcggtaccttgttttcaatctatattccgaaagtgaaacctaatgacagctccattaaccctattgatcgttgaggacgaaacgccgctggcagagatgcatgcggaatatattcgtcacattcccggattcagtcagatattactggcgggaaacctggcgcaggcccgaatgatgatcgagcgttttaagccggggctaatcttgctcgataactatcttcctgacggcagagggattaatttattgcatgaactggtgcaggcgcattatcccggcgacgtggtgtttaccactgcagccagcgatatggaaacggtgtctgaagccgtacgttgtggtgtatttgattatctcattaagcccattgcctatgaacggctggggcaaacgctaacccgtttccgccagcgtaaacatatgctggaaagtattgatagcgccagccagaagcaaattgatgagatgtttaatgcctatgctcgcggtgaacctaaagacgaactgccgaccggcattgatcccttgacgctaaacgcggtgcgaaaactgtttaaagagcctggtgtgcaacatacggcagaaacggtggcgcaggcactgaccatcagtcgcaccactgccaggcgttatcttgaatattgcgccagccgccatctgattattgctgaaattgttcacggcaaagttggcagaccgcaacgcatataccacagtgggtgacatgataaagccggaggaaacttgcctccggcattactatttacttgcctgtgaccgctgctgccgttcctggcaccatcagctctgtagcaacgataacaatcaccaaaccaacaagcaccggtaccgaggtgcgttttacgacttcaaacggcgagatcttcgccatcccggcaaccgcaacgactacgccagaaacgggcgaaagggtacggcccaggtttgacgcctgcagcatcgggatagtcaaatacgccgggttaatgccggaagagtgcgccagtttcgggatcatctcaacaaacgcataaaacggcgcattgcctgaaccggtcgtgactgccgccagcatggtcagaatcaccaataccagcatcaggatgatactcgccgaaccaaacgaggtagcgatagaaatcagactttgaataaagccgatggtgctaagcccctgagcgaataccccagcggcaaccagcagcatcaccacgttagcaaacgcatctgccattccgcgataagccacttccagaccagagaaaactttctgggtattaaagctgcggaggaactccagaatggaggcaatcagcatacaaatcaccagaatagtgatgatgtgtaattgcggaccccatttaccgtcaaaaatcagtacaccgatgatcggcgtgaacggcaaaatggcataaaacgcaggagcagtggtggtgatttcactgacatctaacatttcatgagagatgtgctcttttttatccagataacgttgccagaagaagtgggcgatcgccatgccgataattgcagcaattgagataggcagcgtcgttttgaaggcgaagtcaatcagcgacatttcggaagcttgcgccgccagcaccacatcccctgaagtcggtgcgagaataatcgccgccggggaggcacaaatggcagcagctgcgccacgactgataccaacgtttaccatcaccggaaatagggttgccatcagcaaaacacccagaccggttgcggaagagacggccagagacatcagacaggcgacaaaataggcggcaatcatcagcaggtaaggggagttaatatactgcaatggttttgacgccagcttgaccaccatatcattcgcgccgatatgggtcatgtaagcggcaaatccacacagcatcataatcatcatgccgaggtcgccgccgcggctcattagtaatattttaacgtattcaacgatatccgtggcgctgtagcctgttgaagcctggctggacggtaacactttgtgccccataatggcactgataatcagcaataacaggccaccgacaaataacacaccagtggcggaataccctttaatgatgtagcgagctacacccacaataaccacaaccccaataaggagttcaatgaatgtcagcataatttttcctgtctccaggccccaaagtaaataataaaaaattcctaaagcttaaggaaaaaatatgcccaataaattggcgatgaatgctgattaaaatcaagaaaaactgccattaagacattgaagttgctgtttttatacatagataacaaaacgcatatttagcggttggcaattatcacataataatgtgtgtaaattgatggtggattgatgcaaatttgttaattgcaatggtgttagctgcggctgtgcgctcaaaaaataatctaacatgagcatgggttgacgatttatattatatacttcgttaagatgattgttgtatctagttaaaaaataaaataatttttccttgattgcattttgtcatcaaaaaagacttggtttttcttttttgactattcccatcgcagaaaacgacgcatcatctttaatcgatgcgcggaaatatttaacttgaacaagcggaaataaatagagcagctattcagattattctttatgttgggtctattaaggttatgttaattgtagctttgctatgctagtagtagatttttgataaatgttttatggtcacaaatgaacgtgagtaaatatgtcgctatcttttcctttgttttattcagttaatcagcgttggtaaagtttttgctaacgcagatgagtggatgacaacgtttagagaaaatattgcacaaacctggcaacagcctgaacattatgatttatatattcctgccatcacctggcatgcacgtttcgcttacgacaaagaaaaaaccgatcgctataacgagcgaccgtggggtggcggttttggcctgtcgcgttgggatgaaaaaggaaactggcatggcctgtatgccatggcatttaaggactcgtggaacaaatgggaaccgattgccggatacggatgggaaagtacctggcgaccgctggcggatgaaaattttcatttaggtctgggattcaccgctggcgtaacggcacgcgataactggaattacatccctctcccggttctactgccattggcctccgtgggttatggcccagtgacttttcagatgacctacattccgggtacctacaacaatggcaatgtgtactttgcctggatgcgctttcagttttgagacaaatgaagttttagtaacttctttaaaatcaatagctaaaataagtaacatcaaaaataacgcgacttttatcactttttagtaaagttgcactggacaaagcgtaccacaattggtgtactggtaaccgacacagcatttgtgtctatttttcatgtaaaggtaattttgatgtctaagattaaaggtaacgttaagtggtttaatgagtccaaaggattcggtttcattactccggaagacggcagcaaagacgtgttcgtacacttctctgcaatccagactaatggttttaaaactcttgctgaaggtcagcgcgtagagttcgaaatcactaacggtgccaaaggcccttctgctgcaaacgtaatcgctctgtaagatacttcagcaagaattcaaaacccgcttaatcagcgggttttttttggtctttagtgtgcggttgaggccgaaaacagccagaaagccagtgctgtcatggcaaaagaccccagaaggttgacgaaaacgttcagtaacgcccagccaaagcggccctcttgtaacaaaaacaccacttctgccgaaaatgttgagaaggttgttagaccgccacaaaatccggtggtgattaatactttccacactggatcaatgttcgtcatcctgctgaaccaggcgaatcccattcctatgatgaatgccccaatcaggtttgctgccagcgtccccaacggaatcgcctgatgcagcgggttaaatcgcatacttaacagccatctcgccacgcttcccgtaccaccgccaataaaaactgctaaaagaagttgtaacactgcaaaatcctgctatttgatttgtatgagtgataagtgtaacgccgaataatcgtcgttggcgaattttacgactctgacaggaggtagcaatgctggttgccgcaggacagtttgctgttacatctgtgtgggaaaagaacgctgagatttgtgcctcgttgatggcgcaggcggcggaaaacgacgtatcgctgttcgtcctgccggaagcattgctggcgcgcgatgatcatgatgcagatctatcggttaaatcagcacagctgctggaaggcgaattcctcggacgtttacggcgagaaagtaaacgtaacatgatgacgacaattctgacgattcatgttccttcaacgccggggcgcgcatggaatatgctggtggcgctacaggcaggaaacatcgtcgcccgttatgccaaattgcatctctatgatgcatttgccattcaggaatcacgccgtgttgatgctggtaatgaaatcgctccgttactcgaggtggaggggatgaaggtcggtctgatgacctgttatgacttacgctttccagagctggcgctggcacaggcattacagggagctgaaatcctggtacttcctgccgcctgggttcgcgggccgctcaaagagcatcactggtcaacgttgcttgccgctcgtgcgctggataccacctgttatatggtggctgcgggggagtgcgggaacaaaaatatcggtcaaagccggattatagatccctttggcgtcaccattgcggcagcgtcagaaatgcctgcactcattatggcggaagtgacgcccgaacgtgtgcgtcaggtgcgcgcgcaactgcccgtcttaaacaaccgtcgctttgcgccgccgcaattattatgatgtttttttactcggcgcttgattcaccttgttacagattgctattgtgtgcgcgcgtcgaatgaccgttaatattctctggtttttaaggcgcgttctgttgccggttatatgtcaagaaggtatctatgggtgagattagtattaccaaactgctggtagttgcggcgctggtcgttctgctgtttgggactaagaagttacgtacgctgggcggagaccttggagcggccattaaagggttcaagaaggcgatgaatgatgacgatgctgcggcgaaaaaaggcgcagacgttgatcttcaggctgaaaagctctctcataaagagtgacgtggcgagcaggacgctccctcaatatcttgttcgatacaaaaaacccgcttcaaaaagcgggttttttatcagacagatgtaagtaattattacaggattacttaacttccatccctttcgcctgcaaatcggcgtggtaagaagagcggacaaacggaccgcatgcagcatgggtaaagcccatcgccagcgcttcggctttcatttcgtcgaactcatccgggctaacgtaacgttgaaccggcaggtgatggcggcttggctgcaaatattgccccagcgttaacatcgtcacaccatgacggcgcaggtcgcgcattacctcaataatttcttcattggtttcacccagtcccaccatcagaccagacttggtcgggatttccggatgcgcttctttaaagcgttccagcagcttcagcgaccagttgtaatctgcaccaggccgtacctgacggtaaatacgcggtacgttttccaggttatggttgaacacatctggtggcgttgcagtcagaatatccagagcacgatccatacgaccacggaaatccggcaccagagtttcaattttgatttgcgggcttttttcccgaatggcagtaatgcaatccgcaaagtgctgggcaccgccatcgcgcaggtcatcacggtcaacggaggtgataaccacataacgcagcgccatatcggcaatggtctgcgccagtttcactggttcattggcatcaggagctaccgggcgaccgtgggcaacatcacagaacggacaacggcgggtacaaatagcgccgaggatcataaacgttgctgtgccgtggttgaagcattccgccaggttagggcaggaggcttcctcgcagacagaatgcaggccatttttgcgcattgcggctttgatgccctggatacgtgtagagtccgctggaagcttgattttcatccattccggcttgcgcagcagggcttcgcgctctgttgccacgtttttaaccgggataagggccatcttatcggcatcgcggtatttaacaccgcgttccatcacaatgggtttactcatagcgtgcgtgttccagttgcgaattacgaaggaaagcgtttcaattcaatagattgttgtaattatcaactatttttgaattaacgactggcagtatatcattgaaacggacctgaaagcagccaaagcggtcgcgaaaatgtaaaattgttgttggattgtgccattttatcgttctgcgctgtgatctggctgtaacaatactttttcaaaatgcattacggataacatctattgctccgtgcaggatgggatcacgcaggctgaatttgttgtagtggatagagaaatctatttgctcctcatttaaggacggaaaaggcagtttttccagcggccagcagcggctaaacaggttataaaaacggctgggaataatcgctaacatgtcactgttggcaaccagtgcagcgattgtcaaaatgttgtagctggtgaaattgatttgccggtccggaaacatttcttgaactctctgccgcagaccgctgaaattttgctcttccggtaacagaagtacatgcgcagcgttgtcgatagtctctctgtcatcttctaaagagagtagtggatttccctcgcggcaaattaacaccatattgtcggtgaacagaacatgatgttgcaccgtacgattggtgcaaaacatgttatcgatgatgagatcggtttgaaactgactgagttggttttccgcgtcgctgatgggcgggttgcgcagtaaaagctgcggatagtgagttttaatcgcccgatagatgacaggaaggaccagggctccgaccgagggagtggtcgcaatagttatcgttcgttgcttatcatagcttccttcgatatccagcgcgccaagaatggactcaaggccctgactgatatactcatgtagatgcatcgcaaatgcggtaggagtgacaccctggcctttgcgaataaacaatgggtcagggaatataacgcgcagtttctgaatagactgactgattgccgagggggtcagattaagcactttcgctgcattaacgatccctttatgtacatatacagcttcaaaaatagtcagaaggttaagatcaatatttcgtaaggttgtaaatatttgtggtttaccttctgacgactttctgcttaaacagggttcaatttgattattactatccacgcacttactccaattttattcatggaaaaataatatttaaaaaattacaataatcttatgtctaattggaacggaacgcttttgctcaccataatcaactatttcaataggttaatcaatggagtgagttacggagcaaggcgtggcaccgcatttctgcaagtgataaagaaaatatacaaacgcgaaggagatgtaaagcattagcaggtattatgagtaatgacccagtgtaaattgggccattgaagtatggaattaagcggtaatatattcgaagtccggattgtttagtagcgctaaaatattttccagtaaacgtggagcaatattattagtcgtcgcttcgggtttccattgtgatattttagccatttccattccggcatacccacaaggattaatacgtaaaaatggtgaaagatccatattgacgtttaatgccagaccgtggaatgaacaaccgcgtcgaattcgtaaacccagtgagcaaattttcttttccccgacatagacaccaggcgcgtcagcccgaggatgcgcttctatacccagttcagccagggtattcaccactgtttgctcaagcaaggtcaccagttcacgcacaccgagtttacggcgtttcaggttaagcaacacatacatcacctgttgtcccggcccgtgataagtcacctgcccaccgcgatcgctctggatcaccggaatatcacccggcattaaaatgtgctccgcttttcctgcctgaccttgggtgaataccggatagtgctcgaccagccagatttcatcaagggtactatcatcgcgggtatcggtgaattcatgcatagcctgggagattggctcgtaaggctgaagaccgagctggcggacaagaattttatcctgatacaaaacggcatctccgtggagaatgagtaaaagtgggggaaaagtatatcacagcgaggagaggggagttacccgaccaggagccgggtaacggagaagcgagttacagaaccatgcggacaatatcgattttgcccagttcttcatacagtgtttcaacctgctcgatatgagtggcgttgatagtgatagataccgagtggtagttgcctttgctgcttggttttaccgttggggtgtagtcacctggcgcatggcgctgtaccacttcaaccacctgatcaaccagctcaggtaacgcctgccccataactttgtaagtaaaaggagtagggaattcaagcagttcgttaagtttggttttcatgtcagctccggcgtaacgtaattaaatagcaactcccgcgagaaggcgggagtttttttactgatgcttagtatatggggacggaaattacactttcaagtgttcaatttttaaccaaaccagtgatggaacattaatttaatgtaatcaatgattttgccgaagaagttaccttccgggatttcttgcaacacaaccagcgggcgttgctcgatcgttttgccatcaagctggaagttgatagttccgacgacctgattcttttgcagcggcgcatgcaattcactgctgttcagcacatagctggctttcagatctttcatgcgaccacgtggaatggtcaggtacacgtctttatcaacccctaacgaagcgcgatcagaatcaccaaaccaaaccggttcagaggcgaactctttacctactttcagtgggttaacggtttcgaagaaacggaagccccaggttagcagttttttactttcggcttcacggcctttaaaagtacgtccgcccatcaccgcagaaatcaagcgcatctggccttcagtcgcagaagcaacaaggttgtaacctgctttgtcagtgtgtccggttttgatgccgtcgacattcaggctgttatcccataacaggccgttacggttcagctggcgaataccgttaaacgtaaattctttttctttatagatcgagtattcattcggtacgtcacggatcaatgcctggccgatcagcgccatatctcgcgcggagctgtactgaccatcagcatccagaccatgtaccgtctggaagtgggtatttttcaggcccagtgcgttaacgtagctgttcatcaagccaacaaaagcgtcctggctaccagcggcaaaatcggccatggcgacacaagcatcgttacccgattgcaggttaataccgcggatcagctgagaaaccggaacctgcatgcccggtttgaggaacatcagcgaagaacctttaaacaccgggttaccggtggcccatgcgtcgttgccgatagtgactaaatcagtttctttaaatttaccggctttcattgcctggccgataacgtaactggtcatcattttggtcaggctggcaggatcgcggcggacatctgcgttctgttcggcgagcactttgccggagttatagtcaatcaggatgtaggactccgcatcgatctgcggtacacccgggatcatagttttgatattcaggtcatcggcatgtgcagcagagataaaggctgtgcaaagagccgtggtgagcgccaggcgcttcatgatacgagcggaaaaaatggtattcatggtctgaactacgacatccgtgatggaattaaaaaagtgccctactatagcaaatgcactaccggcaggcatctgactttccgcgtgactttgttaacgtcatttacagaaattgacacatcagatgcctgctttacgctactgcgcggtagtaataaatgactgtaattgggcttcggtttgcaaacgttgctgcaaggtactggcttcggctttgctggcgaatgggccaagctggatccgccagaccgcgccattttgagttacgcgaccggggacgccgaacttctgtcccagttgctgttggtactgttgcgcacgagcctgatcgctaacggccccgacttgcaccataaagttgccgctggcgctttgcgaggcggcttgcggtgtcaccattgcaggcgaggttgcaggcgttgtcgacggagctgtaacaacgggctgtggcgcaggcgtcggttcgctgccttccagtacaccaggcgctaaggtcgttggagcgccgaggaaaccgctactggttaccggcgcgccggtcggatcttcgctttttagcgtcgaattactgaccggaagaatgtcaccctgcgggccagacactgaacttgttcccgcgccaccgcttaaatcgggaggtgctggcagggcgtaagtctgtttggcgactgtggtacaagccataccaggaccagaaagcgaaccatcctgggcgacaataatcggatcgatacgaactttggtgttgtttgacgtgttaagacggtcagctgccgcgcgagaaagcgaaataacgcggtcgttgccgtaagggccgcgatcattaatgcgcaccacgatcattcgcccgttagccaggttagtgattctggcgtagctggggatcggaagcgttggatgggccgccgtcagctgtgttggatcgaaagcttcgccagaggccgtcaggttactgcctggttcggcatcatagattgccgccagtcccgcctggctaaatcgagacggatcctgcacgattttatagcttttaccgtcgcgctggtaatcctgatttgccgtcgcgttcagtggttcgaaacgcggatccgccccgctaatttcaactatggggccgttacataccgcaggctgcggtacacttaccgtctgttgctgaccatcatcgcttgtacatgccgcgagcattcctgccgcgatgcagatcccgagccactgcttacgcattgcgcacctcttacacgcttttcgacaacattttcctgtgggtgtggattgacattacaatcccgaacccagccatcagcacaattagcgccgatcctccataactgaccagtgggagcggaacccctacaaccggcagaataccgcttaccataccaatatttacgaagacataaacgaataatatcagcattaagccaccagccatgacgcgaccaaaggtggtttgcgctctggcggctatccacagcccgcgcatgatcagcagaatgtagagagcgagcagaatcagaatgcccactaatcccagctcttccgccagtaccgcgaagataaagtcggtatggcgttcggggagaaattcaagctgtgactgagtgccgtgcagccagcctttgccgcgtaatccgccggagccaatagcaattttagactgaataatgtgatagcccgcgccgagtgggtctgattccgggtccaggagcatcattacgcgctggcgctggtaatcatgcatcaggaagaaccacagaatcggaatgaacgccgccaccagcactactgcgacgccaatcagacgccagctaaggccagagaggaacagtacaaacagaccggaaagcgcaacgaggattgatgttcccaggtcaggctgtgcagccaccagcagcgtgggcataaatatcagcaccagcgcgatgccagtgttcttcaacgatggcgggcaaacgtcgcggttgataaagcgcgcaaccatcagtggtacggctattttggcaatttccgacggctgaaaacgaacaataccgaggtccagccagcgttgagcacctttagagatggcaccgaaagcatctaccgccaccagcaaaataatacagatgatatagagatagggggcccagccttcataaacgcgtggaggaatttgcgccatcaccaccatgatgaccagacccatcgcgatttggccgattttacgctccatcatgccaatatcctgaccgctggcgctccagataaccagggcgctgtaaaccagcaatgccagtaagatcagcagcattgtgggatcgagatggactttatcccagaatgtttttttattcggattatccgtcatgattaatggtcctccgctgcggcaaccgctggattttccgcaggcagatcggtgttgttatcacccagcataatgtggtcgaggatctggcgcatcagtgtcccaaccgccggacccgcaccaccgttctccagaatcatggcgacagccacttgcggattgttgtatggcgcaaaggcggtcatcagtttgtggtcacgtaaacgctcggcaattttgtgcgcattataggtttcgttcgctttcagaccgaagacctgagcggtaccggatttcgccgcaattttgtacggtgcgctggcaaagtatttatgcgccgtaccgttagggcggttagcaacaccgtacataccgtctttcgccagctcccagtaaccggaatgaatatcgccgacgggcggttcatgcggctgtacccatggcacctgtttgccgtcttcggcggtgctcatcagcaaatgaggaaccttcacgataccgtcattaatcaggatcatcagtgccttactcatctggattggggtcgctgtccagtaaccctgaccgataccaaccggaatggtgtcaccctgataccacggttttttaaagcgtttctgtttccattcgcgggtaggcatgttgccggaacgttcttccgccaggtcgataccggtgtaatgaccataaccgaatttacccatccattcggagaggcgatcgatccccatatcgtaggccacctgatagaagaaggtatccgcagattcttccagcgatcttgtgacattcagacgcccgtggccccattttttccagtcacgataacgtttttccgaacctggcagttgccaccagcctgggtcaaacagcgtcgtattgcgcgtgatcaccccggcgctcaatgccgaaaccgccacatagggtttaactgtagacgcgggaggataaaccccctgtgtggcgcggttcaccagcggtgtattcgggtcgttcaacaaggcggaataatctttgctggagataccgtcaacaaacaggtttgggtcataactaggcgtggaaaccagcgccagcaccccacctgtacgcggatcggtgacaaccacagctgcgcggctacccgccagcagcgtttcaatatattgctggagtttgagatccagcgtcaggtaaatatcgtgtccggcttgcggtggtacttcttttaactggcggataacacgcccacggttgttaacttcaacctcttcataaccggtctgaccgtgcagcacgtcttcatagtaacgctcaatgcccagcttaccgatatcatgcgttgccgcatagttggccagtttgccgtcattattcaggcgttcgacgtctttatcgttgattttcgacacatagccgatgacgtgggtcaacgccgaaccgtaaggatagtaacgacgtttatagcctttaacttcgacacccggaaaacggtactgattgacggcaaagcgagctacttgtacttcggtcaggttagttttcaccggaatagaggtgaaacggtgtgaacgtgcgcgctcttttcggaatgcagcaatatcgtcatcggtcagatcaaccacgctgcgcaaagcgtccagcgtttgctgcacgttatcgactttctctggcatcatttctatctggtagatagtgcggttgagggccagagggataccattacggtcgtagataatgccgcggctgggcgcgataggcaccagcttaatgcggttttcattagagcgagtctggtagtcggtaaagcgaacaatttgcagattatacaggttggcgataagcacgccggtcagcagcaaaatccccaaaaaggcgaccagcgcccggcgcacaaacagcgcggactctgccgtatagtcgcgaaaagagttctgtagtttcatccgctgcgttttctactcaaagctcccttatcactcacggtgataaggatggttggtggtgatgctccacgcccggtacagactctctgcgaccagcacgcgaaccagcggatgggggagggtaagcgccgacagcgaccagctctgctccgccgccgctttacaggcaggcgacaacccttcaggcccgccaatcagtagactgacgtcgcgaccatccagcttccagcgttccagctcagcggctaactgcggtgtatcccagggcttgcctggaatatcgagggtgacaatgcggtttttgcctgcggccgccaacatctgctcaccctctttgtcgagtatgcgcttgatgtccgcattcttgccgcgttttccggccggaatttcaatcagctcgaagggcatatctttcggaaaacgacgcaggtactcggtaaaaccggtttgtacccagtccggcattttcgttcccacggcgacaagttgcagcttcacgcattaactccagagtttttccagttcatacaggcgacggctctcttcctgcatgacatggacaatcacatcgcccaaatccacgacaatccagtcggcgctgttttcaccttctacgccgagcggtaacaggcccgctgcgcgagactcctgcacaacgtggtcagcaatggacataacatgacggctggacgtacccgtacagatgatcatgcagtcggtgatgctggatttgccttgaacgtctaaggcgatgatgtcctgacctttgaggtcatcaattttgtcgataacaaaatcctggagtgctttaccctgcaagttttccccctgggtgaatcaaatagataaaaatggtctgtcagtatacctgaaccagaggcgatttcgggacaattgtcgccgaatcggctttcgaaagtgggctatcatcccaccccgcgccgcagattgcatcgccatttttgtaaaacaatttctacaaagtcgtgtctggcgaaaaaagtctggctgcggagaatatcagcctgcccgggtctgtcaatggtcgttgcggcttacccgtaaaaaaacagaaaagtcatgcattctcgaccccgatggcacggctattgaggacgcgtagcgtcgcgaatttttggttgatatcaatggtgctccaacacccctggtcaacgcggaaatgccacatagcctcggcaggcatgccaattaaacgggcgattaacagactcagtacaccctgatggctgacgactaaaatattctgatagtgctgaaattcactaagccttgcgataaagcgttccacacgttgcgaaaatgcctgaaatccttcaccgttcgtggggattgcatgctgccagtcattgcaccacgcgctatagttttcggcatcttcttgcatgaggtcgcgatgatgtcgcatctcccagtcgccaaaaaacatttcgttgagttcagggatgatttgcacggggagctggcggtcactgagaaccagtcgcgcggtatgctgtgcccgttccagttcactgcataaaaccagatcaaaggaaacaccatgtagcagcgtatgcagattttgcgcttgctcaataccgcgtgcggtcaggggtgtgggcgcatgaccgctgtacagaccatcgacattcgcttgcgtttcgccatgacgaattaaccacagtcgcatcatgccctccgtaacgacaggtatcagcgatacaagccttgttggttaatgtaagtcagtaccggttccggcaataaatcctcacacgattcaccgttttgcaaacgttcgcggatgatggtcgccgagatgttaaaccacggcgtttcagccagataaattttaccggcaggctgaaggtgaagatcttccgggttatgtgtcaaatgatcttccagccattgctggtattgcggttgcgccatttcaagtgggtaacctggacgccgacagacgatcaaatgtgcattgtcgagtatcgtttcgtattcgtaccaggtcggaaaggtcagcaatgaatcctgaccaataataaacgccagcggcacgtccggcccttgttcctgccgccactctttcagtgtttgcgcagtgtaagagggggcattgcgctttagctcgcgttcatcaagagtaaataatggcttgtcggcaatcgccagttcaagcatgtgtttacgctgcacgctgttcgcttccggctggggacgatgcggaggaacattattagggatgattgtgacccgcgtcagaccaatcaaattcgccagcgtttccacgggtttaagatgaccatagtgcaccggatcaaaggtgccgccaaacagagcctgtaaagatttcatatcaaccgtcgataaatacgtccgccaggggtttatggcacaacagaagagataacccttccagctctgcccacactgactgaccgtaatcttgtttgagggtgagttccgttcgtgtcaggagttgcacggcctgacgtaactgcggctggcttaagcgatttaacgcctcgcccatcatgccccggcggttctgccatacccgatgcttatcaaacaacgcacgcagtggcgtatgggcagactggcgtttcaggttaaccagtaacaacagttcacgttgtaatgtgcgcaacaaaataaccggctcgctgccttccagacgcagttgctgaagaatatgcaacgcgcgcttactttttcccatcaacaaagcatcaacccaatgaaaaggggtgaaatgcgcggcatcattcaccgcctgttcaacgcgcggtaatgtcagtttgccgtctggccagagcagcgataaacgctccagtgcctgagccagcgccagcaggttaccttcataacagtagcagagcacctgattcgccgcgtcatccagttctaagttgagctgttttgcgcgcgcagcaacccagcggggaagctgagcctgctccggtgtctgacaggtcacctgcacgctgcgattcgcaagagcagtaaaccaggcggcattttcttgcgctttgcttaatttattaccgcggacgatcaacagtaggtcgtcatgcagaagtccggtgagtgtgagaagttgttcattgatcgccgcattcggtccgttttctggtaacaacagcaatagcgtttgtcgactggcaaacagactcatagcctggcataacgaaaagatcgcattccagtcagtgttgggatcaatggaaaaagtgtggtgttctgcgaatccttgtgccgcagctacctgacgaacagcgtcctggctttcctgcaataacagaggatcgttaccaagtaaaagatacgccgcgcgcagcccttcattgagctgcgcgcggagttgttccgggtacaaccgaatcatcagttacccagcgtggtggagacgcgtgcaggcgttgccggagtatccgttgtggtcgacgtctgttcttcgtcggaacgaatatccgcagcacggatgcttggcagcttacgaatcagctgttcggcagcacggtcgtacatctcttttacgatcatgtcttgttcgttatctttcgctaacgccatttgcgggttatcaaagaacgaacggaagactttggcgctaatcgggtagatatcacggccggggatcaacacggtcgcattcaccgtcatgatcatctgatactctgctgtttgaccgttacggaataccgatgcggtatctttcgcgatgctcactttacccaaacgcagggatggaacgtccttacgcgtggtttctttatcaagcaactcgacaccattcagacgtaactggttacgcaccgcacggcttaatggcccgttcggatcgcctgagtccaggatcatgaccttcatagtggaaggaacctgcgtggtatcacgcagatgccagccacacccggcggtgattaacaccgccagagataacaacaatgttgccagatatcgcacgcttcctcccgcgcttagccaacgaccagattgaggagtttacctggtacgtaaatcactttacgcacggtaacgccatcaagatattttgctaccagatgttcctggccagcacgttcgcgaacctgttcttccgttgcgtccaccggaacggtgattttggcacggactttaccgttaacctgcaccacgaccagcgtggagtcttccaccatcgctttttcgtcagcaaccggccacggcgcgttgtcgatatcgccttcgcctttcagttcctgccacagcgtgaagcagatgtgcggggtgaacgggttaagcatacggacaacggccagcagcgcttcctgcatcagagcgcgatcctgctcgccatcggttggtgctttcgccagtttgttcatcagctccataatcgccgcaattgcggtgttgaaggtctgacgacggccgatatcatcggtcactttagcgatcgttttatgcacatcgcgacgcagcgctttctgatcttcagtcagcgcatcaacgttcagtgccgcaacatcaccttttgctgtgtgctcgtaaaccagtttccagacacgtttcaggaagcggttagccccttccacaccggattcctgccattcgagagtcatatcagccggagaagcaaacatcataaacagacgaacggtgtccgcgccgtaacgttcaaccatcacctgcgggtcgataccgttgttcttcgacttggacattttgctcatgccggtataaaccagttcatggcctgccgcatctttcgctttcacgatacggcctttctcgtcacgttcaacgatagcatcaaccggggaaacccagttacgttcgccgttttcgccaacatagtagaaggcatctgccagcaccataccctgacacagcaactgtttcgctggttcgtcagagttcaccatgcctgcatcacgcatcagtttgtggaagaagcggaagtagagcaggtgcataatggcgtgttcgataccaccaatgtagatatccaccggcagccagtagttagccgcttcggaatccagcataccttctttgtactctgggcaagtgtagcgcgcatagtaccaggaggactccataaaggtgtcgaaagtgtcggtttcacgcagcgctggcataccgttaacggtagtttttgcccactccggatctgctttaatcgggctggtaatgccgtccatcaccacatcttccggcaggatcaccggcagctggtcgtccggggtcggcattacggtaccgtcttccagcgtcaccatcggaatcggcgcgccccagtaacgctgacgagaaacaccccagtcgcgcaggcggtagttcactttacgctcgccaacgcccatcgcagtcagtttatcggcgatggcgttgaaggccgcttcatggtcaagaccgttgaattcgccagagttgaacagcacgcctttttcagtcagggcttgctgagaaagatctggctcagagccgtcagcagccaggataactggtttgatgttcaggccgtatttagaggcaaactcgtagtcgcgctggtcgtgacccggaaccgccataactgcgcccgtgccgtactccatcaatacgaagtttgctgcccaaacgggaatttcttcgcccgttaatgggtgaacagctttaaagccagtatcgacgccttttttctccatcgtcgccatttcagcttcggcaactttggtgttacggcattcgtcaataaaggccgccagttcaggattattttccgccgctttctgcgccagcggatgacccgcagctaccgccaggtaggtacaacccataaaggtgtccgggcgggtagtgtaaacggtcagcgtgttgtcatagtcgttaacgttgaaggtgatctccacgccttcggaacgaccgatccagttacgctgcatggttttaacggtgtctggccagtgatccagtttatccagatcgttgagcagctcgtcagcgtaagcagtgattttgataaaccactgcgggatctctttacgttcaactttggtatcgcagcgccagcagcagccgtcgataacttgttcgttcgccagtacggtctggtcgttcgggcaccagttgaccgcagaagtcttcttatataccaggccttttttatacagctcggtgaagaatttctgttcccaacggtagtattccggcgtacaggttgccagctcgcggctccagtcataaccaaagcccagcattttgagctggtttttcatatacgcgatgttgtcgtacgtccacggtgccggagcggtattgtttttcaccgccgcgccttccgcaggcagaccaaacgcgtcccagccgatcggctgcaggacgtttttgcccagcatacgctggtagcgggcgatcacgtcaccgatggtgtagttacgtacgtggcccatgtgtagtcgaccagaaggatagggaagcatagacaggcagtaatacttctctttgctctcgtcttcggttacttcaaatgtgcgcttctcatcccaatgaagctgtactttggattctatctcttccgggcggtattgctcttgcatggcagccagtggtcctgttttcaatacggctacaaatgtagcgttgaggtggtttttcagatccgcatagcatagcccaaacgtccgcgtcaaaacagcctttcgcgcactcgacgttgaaatgatgcccggattattcatacattaatttacagagtttgtgggcgtattagcaaagcaaggaacaaagaacgtctattattatagtcagttaacgacccgggagatgaaacgatgaacaaggttgctcaatattaccgtgaactggttgcgtcactgagcgaacgcctgcgcaatggcgaacgtgatatcgacgcactggtggaacaggcgcgcgagcgcgtaataaaaacaggggagttaacgcgaaccgaggtcgatgagctgacgcgagctgtcagacgtgacctggaagagttcgccatgagctatgaagagagcctgaaagaagaatctgacagcgtctttatgcgggtgattaaagaaagcttgtggcaggagctggcagacatcaccgataaaacgcagcttgaatggcgcgaagttttccaggacctcaatcatcacggggtttatcacagcggagaagtggtagggctgggaaatctggtctgcgagaaatgtcacttccatctcccgatctacacaccggaagtgctgacgctatgcccgaaatgtggtcatgaccagttccagagacgcccgtttgagccgtaatagtctgatttcgcacagcaataaagagaatatgggccgaatgaaattccccggcccttgtttttatctctacagtaaatcttcagtctcacgaatttcctgactgacatctctggttccggatgactgaactttacgatacaggtcgagagcctgtcggagatcgacaggtcttccttctccgtagtgatacataatggccaggttataccaggcagtggcgtcattgcattcagcggctttcgtaaaccattcaaaggcagcctgataatctttctcaacgccttgtccgtgtttatacatataaccgatgttgacgtaagcgccgacgctcccctgagcggcagccttcagataccagtacatcgcttgcttatagtcctggtccaccccttcgccagcgttataatcccatgcaatttgaaactgagcatgccgattaccctgctgtgcgcttttcaaataccagaatgcggcgagtgtcttgttttgagcaacgccttttccgtcttcataaagatcggccagattgttttgcgcgtcactatggccttgtaatgcagcttgtttgtaccagaaaaatgccagcgcatagtcttttgcgactccgttgccatttctgtacatccacccaagattattttgcgcataagacattccgctctccgcggctatctgataccagacaaccgcttctttataattgggggcttctccacgatccagtgtccagccaagggcgttggaagcgaaagtatggccttgtagggcagcttttttcagccagaagatggcttgctcattatctttatgacggcttttatcctcggtatacttttgccctaaggaatactgtgcttcacaatgaccttgctcagcggccagcttcagccagtaaaaggctttttcgtcgtccggagaatcaattgcgctatcgcgattataataaaacccaacaatatattgagcctcgcaatcgcctttttcagcacgttcgataatctcatctattgataaattatcgcagcaacttgacgtgaaaatcattatcatttccttatggttgcagataaaacatattatatttttatgtgttccattttgcgtaagccttattttatgcgtattatgtcgcgtcagaaaagtataaataaacgagcctcgcaatgcggctaatattcatttaatgaatatttaaggataaattatatggacatggagtcgcaaaaaatattgtttgcactttccactccgatggaaatacgcaatgaatgctgtttaccttcgcattcatcacccaaaatgtatttaggtacatgcttttttgacctttcttcctcctggggaattgatgcccgtgatgacctgctgcgcacaattcaccgaatgatcgataacggtcatgccgctcggttggcagggttttatcaccgctggtttcgttattcgccatgtgaatggcgtgactatcttgctgaactaaatgagcaaggtcaggcttatgcgcaatttgtcgccagcaccgccgaatgctgtggtgagggaggaattaaagcctgggattatgtccggatgggttttttaagccgaatgggcgtacttaataactggttgagcgaagaagaaagtctatggatccagtcgcgcattcatctacgggctctacgttattatcgtaactggcggcaatactttgccggttatacctttggtcggcaatattggcagtctcccgaagatgatcatctgcagttattacgcgaattcttagcgcgtaaagaatacgacgattccggcaatgatatgttttatcaattatttgccagtgatgatgcgtattaccctaccttgtcctggcaaccattggcttactattctgcatgcccggaaacgcttaaggatatgagcgacctatgaaaaattgctggaagattctcgaaatagaggaaacgactgatgtcgatattatccgccgcgcttatctggcgctgttaccgtcctttcatccagaaaccgatccgcagggttttaaacaacttcgtcaggcgtatgaggaggcgctccggattgcgcagtcgcctgctaaatctgtttggcaaccagaagaatatgaggtagcagaacatgaaattctgctcgcctttcgcgcgttacttgcctctgatagcgaacgttttctgccctccgcctggcagcgattcattcagcaattaaattattgctcgatggaagatattgatgaattacgctggtcgctgtgcacaatcgccatgaacactgcccatttatccttcgagtgcgtggtgttattagcagaaagattgcggtggttgcaggaggaaaacgtcggggaaatagacgaagaagaactggaatcctttttatatgccattgcgaaggggaatgtttttaacttccagaccattctgcatctgcccgttgccgtgcaaaatgacaccatcgatttttaccaaatgttcgctcggatttggtcatcgcatccagaatggctgacattgtatttagcgcaacatcgcgcagtgatcatccccgatgatgcaaaactgcacagaaatttactccgctggtatagcgcaggtcgcctggatatccccgaacttctggattacgcccggtcgtggcgggaagctgaacctgataatgaagatgcgcgttattatgaatacgcgcaacgcgtctattgtggagaaggcgaaagcttgctggcagaactttgtgactactggcgcgagtatccctccacccaggcggatgctttaatgttgcaatggtgccgtcagcatcgggtcgattattacccattagtggtgatgatgattgaagcgcgtgatctggttaacgataagggaaaaccgctactttatgtccccggcgacagcgcccgtacgcgttttcatttatacgaaatactcagcgatgaaaaactctctgcgctggggcgttcactggtcgagatggttttgcacaaaggacgtaagccgcggatctcactcacgcgtgatacagaacatcccttatggccattatatttagttgccaaacaattagtgcaggccagccaaccgacagaagaatcattaatgccgattgtgagccgccttgatgcagaagatcgttgtccactggaagcattaattattcgtcgattattaattcaggcggcgaattttaccggtcaggaaaccgtcgagccggagccgcaaccgcagccaatgcccgttgacgatggcgggctgggctgtctgggcgtcatcaaaattattttctacatttttatctttgccggtttgatagggaaaatactccatctcttcgggtgacagtcgacgttaatgtgcgggaagtccggcaagtaatctttccgcatttttgtaatgttgtttggcggccagttttaaccatttttgagattcataatggttaacattaataccagtgccatttctgtagatcaaacccaaagtatattgagcatgagcatacccttgttcagctgcttccttataccagagaattgctttacgggtatcgggtttgactcccaggcctttcaggtagatccaccccagtttgctttgtgcgcgcggattttcctgttctgctgattgctcataccagtatctcgcctgtgtataatccagtggtttaccgtcgctaccatgaagataaaattcgccaaggcgatattgcgatgttgagtgaccatgaatcgcggaaagctccgtggctgccgtggttaacggtagactgcctggtgagcttaaataatcaaaggcataattcaccatggctttatcacgcaacgttgttttcttgggttggctaatacaggtaattgctgcaactataaatattgcgaatatatacattaattttttattcatatgtgaatacttcgattttctttttattttgaaagcgtcaagtttatactcatcaataataaaaagtagtcagttaatgcacttaagggattattaacaaatgaataaggaagaacaatatcttctttttgcgctttctgcgcccatggaaatacttaatcagggttgcaaacccgcgcatgactcgccaaaaatgtataccggtataaaagaattcgatctctcatcatcctggggaataaataatcgtgatgatttaattcagactatttatcagatgactgatgatggtcatgccaatgatttagctggcttatatctgacatggcatcgctcttcccctgaagagtggaaagcattaattgctggtggctcggagagagggttgatttatacccaattcgttgcccaaaccgctatgtgctgtggagaagggggaatcaaagcctgggattatgttcgaatggggtttctgtcacgggtcggtgtgctcaacaactggctgacggaagaagagagtttatggctgcaatcgcgcgtctatgtacgagctcaccattactatcacagctggatgcactatttttccgcctattcgttaggacgtctctactggcaatcttctcagtgcgaagacaacacttcgctacgcgaggcgctaaccctgtacaaatacgatagcgccgggagtcggatgttcgaagagctggcagcgggaagcgatcgtttctatgccacgcttccctggcagccattaactgtccagcctgaatgcccggtaacgcttaaggatgtgagcgacctatgaaaacatgttggcaaatcctcgaaattgaaagcacgacgcaaatagacattatccgccaggcttatcttgctcgcttaccgttatgtcatcccgaaaccgatccgcaggggtttaaagcattacgccaggcctatgaagaggcgctgcgactggcggtaaatcctgtcggggaagcagataatgaagataaagatgccgccgctgaacatgaaatactacgtgcattcaggacattactggattcagaaagtgatcgttttcagccctccgcctggcagaaatttattcagcaattaaatacctggaacatggaggatgtcgatcaattacgctggccgctgtgtgcaatcgctatagaagcgcgatatctttcattaaattgtgcttctttgctggcagagcgtttgaactggcattcgtttaatgacagcgaaggaatggatgaggaagaaagggaggcttttcttgaggccattcaggctggtgattgtttcgatttccttagccttctggaatatcccgtcgcgttacagaaccagactgttgaatattacttcgcgctggaacgttgctgccgttaccatcctgactatgtcactgcgtttttggcgatggaaggtccgtggttcattcctgatgatgcaaagttacatcgcaaactgttgcgctggtacagctcggtgcaaacaggtatggcggaactcattcctgtagccaaacagtggcaagcggaagaaccagaaagcgaagatgcccggtattaccagtgtgcacaacgtttgtactgcggcgagggggaaagcctgcttgctgagctctgcgcatactgggagagttacccatctacacaagctgataatttgttgttgcagtggagcaagcgtcattgcccggattatttcgcgttattagtgatggttatcgaagcgcggagcatggtagatgcgcaaggtcaaccgctgaaatatgttcctggtgagagcgcccggacgcggctgttatgggcggaaattttacatagcggaaaattatcgccgttaggtcaatcgtttattgagtcgttattcttcaaacgcaaagcatgggcgtggtggaaatcgagagtcggtagcgagacagaagaagattcaccgttactggatttgtatcgggtagcggaacaggtagtacttgaagcgtttccgaaacaagagatgctggcccgtcttaatacaaggctggaaggcggagatgctcatccattagaggccattatcacccggttgctgttgacgaaagtaaaactcgagccggaggatgaagatgtcgatgagccaacacctgaaaaccatgaagaaaaaaatgatgagggtgaaaaaccacagagcattaccagcattatcaaaatcagtttaacggtgctggttataggttatgctctcggcaaaatcgcgatgttgtttagttgacgatgtgttttttgcgccgatgccggatgcagcatttacgccgcatccggcagccgtgattatgaggtctcaatggctaaataaacgctcgcccgccgcctgacctcatcgacgcgggccatatcgtttgactgcagcgccgcatcaaaatcggtgatcacccggccaatctcttctcgctcgtcacccagcgcccgcgcccacaactcttccagtttggctttaaaggtgcgattgatgagcatatcgcgcggataaattttcaatgcggataaccgcgtccgactctcttcaatctgctgcgcgctcaatgttaccgggctgtggttaatcactctggacttaacgctgccgtcttccagaagcacgtcaacttcaagcaacccgttgatatcataactaaagcgaatatcaatcgactgataagccccggttttcttcaacggcacatcgaaggattcaaccagaatgttatttttaactttgtggttttctccctgatagacgttaaccgtaatagaatcctgttccgggtgcatggtcgagtaagtttctacacgcgacaccggtactgtggtgtttcgttcaataattggcgagaaaatgccggaaatgccctggcggttaacttcaacgcccaacgagtaagggcaaatatcagtgaggatcacctcttcaatatcttcactgcgtaagcggcaggcggcctggattgctgcgcccagcgcgacaatggtgctcgggtcgtaactttgatacggtaatttgccaaacagacgcacggcgattcgctgcaccagcggcatttgtgacgcgccgccaaccagcaccagactgtcgatttgactcggcttcagacgtgcatcgcgcaacgcctgttcaatcggcactcgcaagcgattgagcagcggcaaccacaaatcttccagttcgttctcgtaaaattcgcactcccgcgtttcatcctggtactgccagcgaatgtgcaatggcgattgattgctacattttgccgcttccacacaggcgtacaaggctgccagttcactctcgttaagcgtggtcctggcgacatccgcgcgctttaaaacgtcatcgaccaacatatgggtaaaatcttcgccaccgaggaagttatcgccagcggaggcgtgaacttcaatcaccggcgtggcgtattcgagcaccgtgacgtcaaacgtgccgccaccgagatcaaaaaccagcgagcgggtattttgttgcgtatgcaggccatatgccatcgcagctgctgtgggttcattaattaagcgtaccgcatttaacccggctaactccgctgctaaacgggtatgcttgcgttgttcatcgctgaaataagccggaacggagatcaccacatctttaatcggacgttgcagaaattcttcggcatcttcttttaatgagcgtaataccaaagaggacagttctggcgcgttaaatgtgtcgctgcctaaccgccagttggtattactgcccattgcacgtttaaataacgctgccgttttatccggatgcgaagtacgccgtgatacagccggttttccgactaaaatatgattattttcatccatgctaattatggatggtgttaaatattcaccgaacttatttggaattaattgcgcggcaccgtctttccagacggcaattaaactattggtagtaccgagatcgataccaatggcgagttctgcattatccattgcattta

SEQ ID NO: 481 - DNA, 218701 bp, Escherichia coli
  modified_base (114164)..(114164): a, c, t, g, unknown or other
  modified_base (114166)..(114168): a, c, t, g, unknown or other
  modified_base (114187)..(114187): a, c, t, g, unknown or other
  modified_base (114192)..(114192): a, c, t, g, unknown or other
catccatgctaattatggatggtgttaaatattcaccgaacttatttggaattaattgcgcggcaccgtctttccagacggcaattaaactattggtagtaccgagatcgataccaatggcgagttctgcattatccattgcatttatatcttgaaagaaaaagagataaacagattaagaccacccaggtaacgcgtggtgatcttaatcaatgacgtgtgttaagcgtaaaatttcagacgatcagccagtaaatcaacaaagccctgacgatcaacatcgaccattacggtggcattcggtttattgccagtcagataataataatcaacaaccgtcataccctgagtatatttcccctgtgtttccacgccaacccagcgctcaacagtggtaaacaactccggtttcaacagccaggcgatggtgcatgggtcatgcagcggtgcgccgacaaagccccatttttcgtctttatgatattcgaggaagaaatccagcagttcggcaacaatggttgaaacagggttgccaatcgcgcggaaacgctcagtgtcttcaacgtggatttgtgctttgtgagtaacatccagaccggccatcaccaccgggatccctgactggaagacaatttctgccgcttccgggtcaacgtaaatattaaattcagccgcaggcgtccagttaccaagccccattgcgccgcccataatcacgatacgggcaattttgctatgcagttccggatggctattgagcagcaaggcaacgttagtttgcggtccggtagacacaatcgtgacaggttccgcactttcacgcagcgttttcgccattagctctaccgccgtacagttttgcggtgcgaacgccggttccggtaatgccgggccgtcgagaccgctttcgccgtgcacattgtccgcgataatcaactcacgcattaacggttttaccgcgccgcctgctaccggaatatcggtgcgattgagcaaggtcagcatacgaagaacattgcgtaaggttttttctggtgtctggtttccggcggaagacgtaattgctttgacatcaagctctggtgaggcgagggcgagaactattgcgatagcgtcgtcatgacctgggtcgcaatctaacagaattggcagtgccattgttgctccttgttgtgtgcttctttgcgacaagggtaacgccaggatgtaacagatacgaggggcgaaacgataaagcgtgagatggcgcgcacttgggtatgcgcgccagagtgattaatgcaggattttcgcgaggaagtcttttgcgcggtccgatttcggatcatcgaagaaagcgtctttcggcgagtcttcgacaattttaccctcatccataaagatcacccgattcgccactttgcgggcaaagcccatttcgtgggtcaccaccatcatggtcattccttcgttcgccagttccaccatcacgtccagcacttcgttgatcatctccggatccagcgccgacgtcggttcgtcgaacagcatcgcaataggatccatacacaatgcgcgagcgatcgccacacgctgctgctgaccgccggaaagctgcgccggaaatttattggcatgtgcggaaagtcccacgcgctccagcaatttcaatgctttttcacgagccggcgctttatcgcgtttaagcactttcacctgcgccagggtcaggttttcgataatcgacagatgagggaacaactcaaaatgctggaacaccatcccgactcgggaacgcagctttgccagatcggttttcttgtcgttaaccacgataccatcgacggtgatttcaccttgctgcaccggttcgaggccgttgacggttttaatcagcgttgattttccggaaccagacgggccgcaaaccaccaccacttcgccttttttcacttcggttgagcagtcggtcagcacctgaaagtgaccataccattttgaaacatttttcagggtaatcattatgctgtccttcttttcaagtagctgaccaacaacgacgcgctaaggctaataacgaaataaacaaatccggcaaacaggatcatctcgacctgcgtaccatcacgctcaccaatggttgaggcggtacggaagaaatcggccagagataacacatacaccagtgaggtatcctggaacagtacgatgccctgagtgagcagcagcggcaccatcgcgcggaacgcctgcggcagaataatcagtttcatcgactgccagtgagtcattcccaacgccagcgcggcgctcgactgaccacgagaaatactttgaataccagcacggataatctctgaatagtaggccgcttcaaacatcgaaaacgccaccatcgccgaaattaaacggatatcattttttggcgataatcccagcacgttttgcagaaaacccggcacgatcaggtaaaaccacagcaaaaccataactaaaggaatcgagcggaatacgttaacgtaggctttggcaaaccacgctacgggcgcaaagctggacaagcgcatcaccgccagcatggtgccccacaaaataccaatcacgactgccgtgacggtgattttcagcgtgatcaccagcccgtcgagcagatatggcagggaaggaacaatggaactccagtcaaactcgtacattatttgccccccatgttgccgggcaggcgaactttacgttcaaccagcgtcatcaccagcatgataaccgcgttaatcaatacatacgccagcgtaatggcggtaaacgactcccaggcgtgagccgagtagtcgagcaatttacccgcctgcgctgccatatccaccagaccgatagtcgaggcgatggcggagtttttcaccaggttcatcatctcggaggtcatcggcgggacgataacgcgataagcattaggcagcagtacatagcggtaagcctgcggtagcgtcaggcccatcgccagcgcggcattcttctgcccacgcgggagcgactgaatagcggcgcgtacctgttcgcaaacacgggcggcggtaaacagccccaggcagagcatggatgaaaggaaaaactgaatattgggatccagctcggccttaaaccacatgccgattttctccggcaacagctccgggatcaccagataccaggtaaagaattgcacaatcaacggcacgttgcggaacagttcgacatacaacgtacccagaccggagagaaaacggtttggaacggtacgtaaaatgccgaaaaatgaaccgacgaggaaagcgataatccaggcgcagatcgacaaagcgatcgtcacctgaaaaccactccagatccaaccaagataggtggtgttgccgaacggggcttgttgtaaaaaaataccccagttccagtctatagacataaatctactccagaaaaagagggtagcagcgttaactgctaccctcgaagattgttacccagcgtattgcggttttcaggcccgatggggaacgaccatcaggcgtatagtctgtccgtgctacgtaacaatcgagagggctggaatttccgcccctggttcttgtaattagttcagtgccttgtcattcggttctttgaacagtgctttcatttcgtctgacagttcgaaattcatgttcaggtttttcggcggaattggatttttgaaccatttatcaaaccatttttccgcttcaccggaggtctgcacctgagcgatggtgtcatccatcagctttttgaactgcggatcatctttacgcaacatacaaccgtaggcctcctgagactgcggcaatgccgacgatttcccagttgtctggtttcttcgctttcgcacgttcaccggccagcagagcgtcatccatcataaaggcaacggcacgaccgctttccagggtgcggaaagagtcaccgtgatctttggcgctgatgatgcgcatattcattttttgctcttcattcagtttgttgagcaaaacttcagaggtagtgccggaagtgacgactacggctttgcctttcaggtcggcaaaatctttgatatcgccgccctttttggtcagcaggcgcgtaccgaccacgaaaatagtgtcagagaaagccgcctgtttttggcgttcgacgttgttggtggtagaaccacattcaaaatcaaaagtgccgttttgcagcagcggaatacggttttgtgaggtaatcggaatcagttttacctgcaagtccggtttgttgagtttctttttcactgcttcaacaatggcgttggagtaatcctgcgagtaacccaccactttttgctgattgtcgtaataagagaaaggtactgaagattcacgatgaccgacgacaatcacaccgtttttggcgattttgtccagcgtactgcccgctaccggggcggcgtcatctgcctgtgccagtcctgcggaaagcgccagggcgaggattgctgtggcaggtttacgtaattgcatatccaactcctttatcttctgcgttaagaacgcatggatacccgttgtgagtgtttgtgttgttatcgtctgcaactttattgtgcagtgttgtgcctgttaggtaacatttagtttggctaaatgtaaagatattgctgttttattgtttgtttttgcgagatgcgccgcaccattccgaagcaaaattcttaaaccgcacctttttggtgctaccgctgatttgtggtggtgcaacctggttgcgtcgcggctgatttcatcgcttacacagtaaataaagcaacttacatgccaaaaaatacttaggggcgaattaattacgattgtaattttaggctgaaaaagtcatatttcggacagaattatcttttcggcatgggacgtttgccgggatgataactgcacacgggaaaaatgctttttacctgtcttttcaaggaagaaacaccttatgtctgcatcttcggttaagccgttaaatgttcaattacccgcaataacccttatcctttttgcactctgtattgggatattttgttatctcgcacaatggatgagttatgaagaggtcgatcaatccgcacttatccatctcggtgcaaacgttgcgcctcttactttgtcgggtgaaccctggcgcttattgagcagtatctttctgcacagtagtgtttctcaactgctgatgaatatgtttgcattcctggtcgtgggaggcgtggcggaacagattctggggaaatggcgactcctgattacctggttattctccggcgtctttggtgggctcatcagcgcctgttatgcgttacgcgaaagtgagcagatagtcatcagcgttggggcatccggggcgattctgggaatagctggtgcagcgatagcaacacagtttgcttcaggtgcgggcacataccataaaaaccagcggcgagtattttctctgttgggtatggtggcgctgacactgttgtatggtgcccggcaaacaggaatagataatgcttgtcacattggcggcctgattgcgggtggcgcgttgggttggctgagcgcgcgtttatctgggcaaaaccgactcgttacggaaggcgggattattgttgcgggcagtcttcttctgaccggggctatctggcttgcgcagcagcagatggatgagtcagttttacaagtcaggcaaagcctgcgtgaagcgttttatccacaggagattgaacaagagcgacggcaaaaaaagcagcagttagcggaggaacgcaacgccctcagggaaacattatccgctccggtaagtcgtgaacaggccagtggtgatttgctcgctgagattgccgatatccatgatatggcgatcagtcgggatggtaatacgttgtatgccgcaattgaaaacaccaacagcattgttgttttcgacctcggacaaaagaaaatcctgcatacctttacagcgcccatagcgaaagaaaagtcagtcaaacattgtggtggctgtaaagatcagggcgtagatcgctggcattaagcccggatgaaaagttgatttatgcgacgtcatttgaagcgaatgcgttatcggtcattaacgtggcgacaggggagattattcagtcgattaccaccggtgcacatcctgacagttttatcctctcgcgtgatggcacaaaagcctgggtgatgaatcgcaccagtaatagtgtgtcagcgattgatctggtgacttatcagcatgtggcggatatcccgctggagaaatacgacgggacggggacgagcggtaaaccaggcgcctgggttatggcactttccccggatgaaagaacattactggttccgggagcaggcagaggtaacatcgtgcggatcaataccatcacgcatcagaaagaagactttcccgcaggtgatgcgcgtggaacgatatcggcgatgcgttttcgacctgaaaacggcgaggttatttttgccgatagtcaggggatttcacgtataagcgtaggggatcaacaagccagcattatgacgcaatggtgtagcaggagcgtttattccgttgagggtattagcccggacggtcaatatttagcgttggtgtcatatggcctgcaaggttatgtcatcctgctcaatattaatgccgggcagattattggcgtttatcctgccagctacgttaatcaccttcgtttttcagcggatggtagaaaaatatttgtcatggcgaagaacgggttgatccaaatggacaggacgcgctcgcttgatccgcaggcaattattcgtcatccccaatatggcaatgtggcttgtatccctgaaccgtaagaaaaaggggcatgataaccatgccccaaagctcaatgagaaagtacgttttgctcatgcaggatacatcaggcacatcaacgtttacatgctcgcagactcatcagcacagcggcaaaaccaaacagcgccgtcagcacccacagcggccagttgccggtacgtgcatacggtgtgagtccggtggtcggtgtcacattagtggtcaacacctcgcgggtgaactgcgggatcatcgcctgaatctcaccctgcgggccaatcaccgccgtaatgccgttgttggtgctgcgcaacagtgggcgcgccagctccagcgcacgcattcgcgccatctggaagtgctgccatggaccaatagacttaccaaaccacgcatcgttggagatagtcagcagatagtcggtatccgggcggaagttatcgcgcacttgctcgccaagaatgatctcgtagcaaatggccgcagtaagctcaataccatttaccgacagcggcggctggatatatggcccacggctgaacgacgacatcggcagatcaaagaacggtgctaacggacgcagaatcgactccagcgggacaaactcgccaaacggcaccagatggtttttgttatagcgatcggctgattcgtagctgtacggtgcacctttacccagcgtgatgatggtgttgtaggtatcgtagcggttctgcttattgagacgcgcgtcgacaatcccggttaccagcgagctacctttatcacgcaactcaccgtccagtgctttgaggaacggttgctgattaatttccagatcggttatcgccgactccggccagataatcaacgatgatttgcccagcagcggtgccgttgcgttgtagtaaatcttcagcgtattaagaagctggtctccgtcccatttcagtgattgcggaatatcgccctgaaccatcgaaacctgaatggttttctccggttgcggggtaaaccattggatgtaacgcagcgggaagggaagggcaaacagcacgacggccaccaccagcggacgccagttgcgtttgactaacgccagtgccagcaggccgctaaccatcatcagcaggaagttaatggcttccacgcccattattggtgccagcccttttaacgggccatcaatctggctatagccgaactgtaaccacgggaagccagtcagcacccaaccgcgcagaaactcggtcacttgccagagagcaggggcggcaatcgccacgcgcagccaggtggttttcggccacaggcgcgacagcacgccagcaaacagtccggtatacagcgacaaatacgccgccagcagcaccaccaggaagatgttaaccgggccaggcatcccgccaaaggtcgcgatgctgacatagacccagttaataccggtgccaaagaggccaaatccccagcagaagccaatagcggcagactggagcgggcggcggttaaaggtcagcgcctgaagccccatcagcgaaacaatcgccgcaggccagacatcgtaaggagagaaggccagcgttccgcaggcaccgaataataacgccagcagcaggcgaatgcgctggcgttcaattaatgaggcaaaagccatgtagttatctatccagtttcggttttattcatccagctttggctggggtgagtcatccgggattttgacatgaacctgaataatacgccgactatcggccatcgccactttgaactggtaaccgtcgatgtcgatagtttcgccacgcgccggaagatgcccaaacgcctgcatcaccagaccaccgatagtgtcgacttcttcatcgctaaagtgggtgccgaacgcttcgttgaagtcttcaatggaagccagtgcgcgcacggtccaggtatgacgactcagctgacggaagtcgatatcatcttcttcgtcatactcgtcttcaatctcaccaacaatcagttccaggatgtcttcaatggtcaccagaccggaaaccccaccgaattcgtcaataacgatcgccatgtggtaacgctgagagcgaaactctttcagcatccggtctacgcgcttactttcaggaacgacaaccgcctgacgtaacactttgtccatgctgaaggcttcagcatcgctgcgcataaacggcagcaagtctttcgccatcagaatcccttcaatgtgatctttgtcttcgctaatcaccgggaaacgtgagtgggcggactcgatgatgacatcaaggcattcgtccagcgtctggttgcgtttcagggtaatcatctgggagcgggggatcatgatgtcgcgaacgcgttggtctgcgatgtccatcaccccttcgagcatatcgcgcgtatcttcgtcgataaggtcgttctgcccggaatcacggatcagcgccagcagttcgtcacggtttttcggttcaccgtggaaaagttggctgagtaacagggagaaaaatcccttcttgttgcttatcgtgtcactactgtgtgaattgtcgtcgctcatggcgtcgtatgggttctcatgttagttaatcaaaacgccgtcgttaatcaccaacgacggggacgtctgccagtcaaatgcctggcaaattattctttctcggcaatgtacggatcctcatagcccagagcaagcataatctctgtttcgagggcttccatttcttctgcttcgtcatcttcgatgtgatcgtaacctaacaaatgcagactgccgtgcaccaccatatgcgcccagtgcgcctccagtggtttgccttgctcctgagcttccttctcaaccacctgacggcagataaccagatcgcccagtagcgacatttccatgccaggcggcacttcaaacgggaaggagagcacgttggtcggcttatccttaccgcgataggtcagattcagactgtggctttcggcggtatcgaccacgcgaatagtcacttccgattcttcctgaaactgcgggatcaccgcattcagccatgtttgaaactggctctcttccggtaacccggaattatcttcacatgccagttgtaaatcgaggatcacctgactcatttttgttcctgttcttcgcgcttgcgttctgccgccagcgccgcttttcgtttttgttcggcttcttcccaggcttcataggcgttaacgatacgcgccaccaccgggtgacgaaccacgtcttcgctgtggaagaagttaaagctgatctcttcgacatcggccagcacttcgatggcgtgacgtaagcctgatttagtattacgcggcaggtcgatctgtgtgacgtcgccggtgataaccgcttttgagttaaaaccgatacgggtcaggaacatcttcatctgttcgatggtggtgttctggctctcatcgagaatgataaacgcgtcgttcagcgtacgaccacgcatataggccagcggcgcgacttcaataacgttgcgctcaatcagtttctcaactttctcaaagcccagcatttcaaacagcgcgtcgtacagcgggcgcagatacgggtctactttctggcttaaatcgccaggcaggaagcccagtttctcaccggcttcgaccgccggacgagtcagcagaatacggcgaatctcctgacgctccagggcatcaactgccgcagccactgccaggtaggttttacccgtacccgccgggccaacgccgaaggtaatgtcatggtcgagaatattggcgatgtactgcgcctggtttggcgtgcgcggcttaattacgccgcgtttggttttgatattgaccgctttgccgtactccggcacgctctccgcactttgctccagtactcgcgcttctttaatcgcaaggtggatctgttccggttcgatatcctgaatctgaccgcgcatcggggctgtatcgacatacaggctacgcagaatgtctgccgcagcggtgacgcaaatcggacggccggtcagtttaaagtggttatcgcggcgattgatctcgatgccgagacggcgttcgagctgcttgatgttgtcatcaaacgggccgcacaggctcaacagacgcgcattgtctgctggctccagggtgatttcgcgagtgtctatgttcaaaccgttcctcttatctgtatgccgccggaagctgaacattcaccggcctataaggaaattattcacgccacaggaaaaaggcgcaagcattgcgataaagatggggataaagagagaaaaaacaaggcccaccggaacggcgggcctgagaattacggttgataataacccacgccaaggtcgttttctttgcgagtacgggcaatcactgattccggtgtttctgccacgcgcagacccatttcatcttcagtacgcaccactttaccgcgcagagagttcgggtagacgtcggtaatttctacatcgacgaatttaccgatcatatccggcgtaccttcgaagttgaccacgcggttattttcggtacgcccggaaagctccatgatgctcttacgcgatgtaccttctaccagaatacgctgggtggtgccgagcatccggcggctccacgccatcgcttgctgattgatacgttcttgcagaatatacagacgctgcttcttctcttcttccggaacatcatccaccatatcggcggctggtgtacccggacgtgcagagaagataaagctgtagctcatgtcgaaattgacgtcggcaatcagcttcatcgttttctcgaagtcttcggtggtttcgccagggaagccgacgatgaagtcagaactgatctgaatatccgggcgcgccgcacgcagtttacggatgatcgctttgtactccagcgccgtatgggtacggcccatcaggttcagaatgcgatcggaaccactctgtaccggcaggtgcaggaagctcaccagctccggcgtgtcgcggtacacttcgatgatatcgtcggtgaattcgatcggatggctggtggtaaagcgaatacgatcgatcccgtcgatcgcagcaaccagacgcaacagatcggcaaacgatccggtggtgccgtcgtagttttcaccacgccaggcgttcacgttctgaccgagcaggttgacttcacgcacgccctgagccgcaagctgggcaatctcaaacagaatatcgtcggacggacggcttacctcttcaccacgggtgtaaggcaccacgcagtaggtgcaatatttattgcagccttccatgatggagacaaacgcggtcggcccttcggcgcgcggttccggtagacggtcaaacttctcgatttccgggaagctgatatctacaaccgggctgcggtcgccacgcacggagttgatcatctccggcagacggtgcagcgtttgcggcccaaaataatatcgacatagtgggcgcgctggcgaatgtgctcgccttcttgcgatgccacgcagccaccgacgccgataatcaggtctggattcttctcttttaacagtttccagcgacccaactgatggaagactttttcctgagccttctcgcggattgagcaggtgttcagcagcagcacatccgcttcttccgccacgtcggtcagttgatagccgtgggtggcatccagcagatcggccatcttcgatgaatcgtactcgttcatctgacagccccaggttttaatatggagttttttggtcatcgacttgctcttgcgaaatagtagccaggaatgcagggcgcatagtgtaatgctttgctgtcgttgtgaccagtatgagcgttatcagcccttgggggtaaaaatcctgtaaacttaaagcatattgctaacaggatgattgaccatgacaaatcaaccaacggaaattgccattgtcggcggaggaatggtcggcggcgcactggcgctggggctggcacagcacggattttcggtaacggtgatcgagcacgcagaacctgcaccgtttgtcgctgatagccaaccggacgtgcggatctcggcgatcagcgccgcatcggtatcattgcttaaagggttaggggtctgggatgcagtacaggctatgcgttgccatccttaccgcagactggaaacgtgggagtgggaaacggcgcatgtgatgtttgacgccgctgaacttaagctgccgctgcttggctatatggtggaaaacaccgtcctgcaacaggcattgtggcaggcgctggaagctcatccgaaagtaacgttacgtgtgccaggctcgctgattgcattacatcgagataatgatcttcaggagctggaactgaagggcggtgaagtgattcgcgcgaagctggtgattggtgctgacggcgcaaattcgcaggtgcggcagatggcgggaattggcgttcatgcctggcagtatgcgcagtcgtgtatgttgattagcgtacagtgtgagaacgatcccggcgacagcacctggcagcaatttaccccggacggaccgcgtgcgtttctgccgttgtttgataactgggcatcgctggtgtggtatgactctccggtacgtattcgccagttgcagaatatgaatatggcgcaactccaggcggaaatcgcgaagcatttcccgtcgcgtctgggttacgttacaccgcttgccgctggtgcgtttccgctgacgcgccgacatgcgttgcagtatgtgcagccggggcttgcgctggtgggcgatgccgcgcataccatccatccgctggcggggcagggggtgaatcttggttatcgtgatgtcgatgccctgattgatgttctggtgaatgcccgcagctacggtgaagcgtgggccagttatcctgtcctcaagcgttaccagatgcggcgcatggcggataacttcattatgcaaagtggtatggatctgttttatgccggattcagtaataatctgccgccgctgcgttttgtgcgtaatctcgggttaatggcggcagagcgtgctggcgtgttgaaacgtcaggcgctgaaatatgcgttagggttgtagccttacaacattgccggatgcgtgccaaccgtaggtcggataagacgcggcagcgtcgcatccgacattgaaggataagacgtgtcaacatcgcattcgacattgaatgaacgcagaaaagcaaaaagctcgccgaagcgagcttttttaatgtggctggggtacgaggattcgaacctcggaatgccggaatcagaatccggtgccttaccgcttggcgataccccaactgggcgcacttacgatgtaagcgtcttgaataaattggctggggtacgaggattcgaacctcggaatgccggaatcagaatccggtgccttaccgcttggcgataccccaacaaattggttttcgaatttgccgaacgtattcgacacattcagaatttggtggctacgacgggattcgaacctgtgaccccatcattatgagtgatgtgctctaaccaactgagctacgtagccagattgtttcttcgatggctgggtacctggattcgaaccagggaatgccggtatcaaaaaccggtgccttaccgcttggcgataccccaataaccgggcggtgaaccgcttactcgaagaagatggctggggtacctggattcgaaccagggaatgccggtatcaaaaaccggtgccttaccgcttggcgataccccatccgtacaacgctttctggtgaatggtgcgggaggcgagacttgaactcgcacaccttgcggcgccagaacctaaatctggtgcgtctaccaatttcgccactcccgcaaaaaagatggtggctacgacgggattcgaacctgtgaccccatcattatgagtgatgtgctctaaccaactgagctacgtagccatcttttttttcgcgataccttatcggcgttgcggggcgcattatgcgtatagagccttgcagcgtcaacctctttttcaaggaaaattgctcgaaagtgactgtttggttaggttgcgaacagcgtggcgctatattcgtcaattattgtttactttgtgttttttccccaccctacagccattcttttgtcgtacaggatgaaattcggaattcaacaatagtggtgggaaattaatctatgaaatactggcctacagtgatgagttgtcaaacagtgatgtggcaaacccggaacatttccttactgcatatcagaattaacaagcacctcaataactgaaacagccccggatttcaccggggctgtttcgcatttcttacttatacgccgactggtgaacgccaaccgcacgaccagacggatcgtccattttcttgaacgcctcatcccactcaatcgctttagcggaagaacacgcgacggaaggaccgccaggcacgcactcagcggcgctcggaagcgggaacagttcttcaaagatctcccggtacagatacgcttcttttgaggttggcgtgttgtacgggaagcggaagcgggcagtttccagttgctgatcagaaacctgctgcgccgccacttctttcagggtgtcgatccaactgtaaccgacgccatcggagaactgctctttctgccgccaggccacgcttgcgggcaggtatgactcaaaacattcacgcaggatgtgtttttccattttgccgttaccgcacattttatcctgcgggttaatgcgcatcgccacatcaaggaattttttgtcgaggaacggaacgcgtgcttccacgccccaggctgacatcgctttgttggcgcgcgcgcagtcatacatatgcagggccagcagtttacgcaccgtctcttcatgcagttctttggcattcggtgctttgtggaagtaaagataaccgccaaacacttcatcagaaccttcaccggacagcaccattttaatgcccattgccttgatcttacgcgacattaaatacatcggtgttgaagcgcgaatagttgtcacatcataggtttcgatgtggtaaatcacgtcgcggatggcatccagaccttcctgtacagtgaagtgaatttcgtgatgcaccgtgcccagatggtttgccacttcctgggctgctttcagatccggtgaacccggcagacctacagcaaaggagtgtaattgcggccaccaggcttcagagcgttcctgatcttccacgcgacgggcggcgtatttcttggtgatcgcggaaataattgaggaatccagaccacccgagagcagcacaccgtaaggaacgtcagacatcagatggcttttaacggaatcttccagtgcctgacgcagctcgtttttgtcggtcacgttatctttcactgcatcaaagtcgaaccagtcgcgatgataataagaacggatttcgccgtcctgactccacaaatagctccccgccgggaactctttaatcgtgcggcaaactggcaccagggctttcatttctgaggccacatacagctgaccgtgctcgtcatagcccatatacagtgggatgatccccagatggtcgcgaccaatcagatatgcatctttttcgctgtcgtacagggcaaaggcaaacatgccctgcaagtcgtcgagaaattccggccctttttcctgatacagcgcgaggatcacttcgcagtcagatccggtctggaactgataacgatcgccatattcggcgcgcagtgcctggtggttgtagatttcaccgtttaccgccagcacatgagttttttgttggttgtagagaggttgcgcccccgcgttaacgtcaacaattgacagacgttcgtgggcgagaatggcgttatcgctggcataaataccggaccagtccgggccacgatgacgcatcaggcgtgacagctcgagtgctttcttacgcagctcaactgcgtctgttttgatatcgaatacgccaaaaattgaacacataaccttctccgttaacctggtatttgttgcttgttgtgtttgcttgtttaaaaaaatgccgcaaagcagcactgtgcgcaagcgatttggcagtgcaaaaataaaaaacgtaatggtgattgctgatttgtgaaaaaggggatggtgtggtgatgtatttattgatggatcgataatttttggcgagttttattgaatgggatgattttaatgatgggtaaaaataagaaaccacgccctgagacgtggttgctattcagataacgtcgatttcagcgaccgacgggtaaatccagcttgggcggaacggcatactgtcgatatcgtcgagcgatgaaacaccagaaagcaccagaatcgtctccagacccgcctggaagcccgccagaatatcggtacgcaagttatcgccgacaatcaccgtttcttccgaatgcgcctgcattttgtttaatgccgcgcggatgatccacgggctgggcttaccaacatagaacggtttgcgcccggagattttctcaatccctgcacacaacgcgccacaagcgggataaaaaccgcgcccgtgggtgtccgggttggtggcgataaagcgtgcaccgttagcgacgaaataggccgctttatgcatcatgtcccagttgtaggaacgcgtttcgccaacaatcacaaaatcagggttcacatcggtaatagtgaaaccggctttgtacagttcatgaatcagtgcgccttcgcccaccacatacgctttcttgccttcctggcgacgcaggaaatcggcagtcgccatcgcagaggtataaaacacgctatccggcacatcgacaccggcagtggcaaagcggttcgccagatcttgcccggtctgcgaaggatagttggtcagcaacaccagcggcaggcctttatccataatcccgtgcaaaaattccgctgcacccggtacggcgacgttatcgtgcatcagcacgccgtcgatatcgcaaattacatttttaatggtcatggactacccagaatattgacaacaataagcgccactataaaagcacattaattttccagcaaatgctggagcaaaataccgttgagcatggcgcgttttaccagcgcaaaagcgccgattgccgagcggtgatccagctcagaacgtaccaccggcagattagtgcgaaacgccttcagcgcctgggtattaatgcagctttcaatagcagggagcagcactttatcggcttcggtgatttcaccggcaataacaattttttgcggattaaataagttgatagcaatggcgatggttttgcccagatgacgaccgacatactcaatcacttccgaggccaggctatcgcctttgttcgcggctttgcagatagttttgatggtgcagtcgtccagcggcacgcggctctggtagccctgctttaacagattcaacacccgttgttcaatagcggcgttggcagcgatagtttccaggcagccaaagttgccgcagtggcagcgttcacccagcggttcgacctgaatatggccaatttcaccgacgttgccgttgcggccaataaaaatgcgcccgttagagataatcccggccccggttccgcgatggacacgcaccagaatggagtcttcgcaatcctgacttgcaccgaagtagtgctccgccagcgccagactacggatatcgtgaccaacgaaacaggtcactttaaaacgttcttccagtgcttctaccagcccccagttttctacctgaatatgcggcatgtaatgaattttgccgctgtccgggtcaacaagccctggcaggatcaccgaaatcgcgatcagctcgcgcagtttgcgctggtagctatcaataaactgagcaatggcattcaacagggcatgttccagcgtttgctgggtacgttccggcagcgggtaatgttcttctgccagcactttgctgctgagatcaaacagggtgatggtggcgtcgtgacgaccaagccgtacgccgattgcgtggaaattgcgggtttcggtgacgatggagatagcgcggcggcccccggtggaggcctgctgatcaacttctttgatcagcccgcgttcgataagctgacgcgtaattttggttacgctggcgggggcaagctggctttgctcggcaatctgaatccgcgagattggcccgtactggtcaatcaggcgataaaccgccgcgctgttaagctgttttacgagatcaacattacctatctgagcttgtccgcctggtgtcatactttctcttattgagttacgacctcgttaccgttaacgatggtcttggtgattttaaaatcaggtgtgaatgcggtcaggttggctactttacctgcggcgagtgtgccgagacgtttctcaacgccaatcgcacgcgccggatagagcgtcgccatacgcagcacttcatccagtgcgataccgcaatgttcgaccagattacgcacgccttcaatcatggttaaggatgaaccgcttaacgtaccgttctcatccacacaaagtccgttacggtagtatattgttttacccgcaaaaatgaactgttcaatgttggcacctgctggcgcggtggcgtcggtaaccagacacagtttgtcgcctttcagacgtttagcgttacgaatgttggcgtaatcaacatgcaggccatcagcaataataccgcaataaatgtcagcttcgtcgaggatcgcgcccgccaggcccggttcacgaccggtaatatacggcatcgcgttgtacagatgggtggcaaaggtaatccccgcgcggaaaccggcttttgcttctttcaacgtcgcgttggagtgaccggcagaaaccacaatcccggcatttgccagtttgctgatgacttccgcaggaaccatttccggtgccagggtcactttggtaatgacgtcggcgttttcacacaggaaatcgaccagcgcggcatcaggcttacgcacaaaattcggattatgggtgccttttttaccagattcagccacggaccttccagatgcagacctaacgcctgattcggatgttttgccaggtactcgcgcataacgcctacgccctgtttcatcagctcatcgctggtggtgataagcgtcggcagatagttagtacagcctgatttctcattggctttctgcatgatttccagcgtttccacgctgaccgcttcagcggtgtcgttaaactgtacgccgccgcagccgtttaactgcacatcgataaaaccgggggagagaatggccccgttcagtgaacgttgttcgatctctggcggcagttccgctaccggacagacgcttttaatcaggccatcagcgataacaaccgcgtggtcatcaagaaattcgtggccggtaaagatccggccctgggttaatgcatacattctgacccccgattttaaaaaatattgccctgagcaaggagccagggcagggataacaattacagacctttgatattttctgcttctaattcattgaaatatcttaaagtcttaactttcagctccatggtggaaggttcatcgcacaccatgatcgcttttggatgcagttgcagacagctgatggtccacatgtggttcacgcaaccttcaactgcagcctgcagtgccagtgctttctggctacccagcaccagaatcatcacttcttcggcatccagcaatgtaccaacaccgacagtcagggcatattttggcacctgattgacatcgttatcaaagaaacgagagttcgcgacgcgagtgtcatgagtcaaggttttgatacgagtacgagaagccagagaagacgccggttcgttaaatgcaatatgaccgtcgttacctacaccgcccataaacagatgaatttttccgtaagaacggattttttcttcatactggcggcattcggcgtcgatatccggggcgttgccgttgagaaggttgatgttttctgctggaatatcaacgtgatcgaagaaattacggtgcataaagctgtagtagctttccggatgctctttcggcagaccgacatattcgtccatgttgaaggtgacaacgtgcttaaagctgacctggcctgctttatgcatttcgactaacgctttataggtggtcatcggcgtgccgccagtcggcaggcccagaacaaacggacgatcggcagtcggtttgaacgcattgatacgattgacgatatggcgagcagcccatttgccgacctgttcagcggtagtcagggggatcagtctcattattcacctcaataagtaaaatgtaagccgttggcggattaggcatctttaagcgtaacctggatttgcgcagacaggcgtcaatccgacctgattttttgaatgataaaataagttttctggtttagccagtaaaagggagtgatgataacgatatttggtgacaaaactcacaaaagacacgcgtttaatttgcgatacgaattaaattttcacacactctgtagcagatgatctaacaatctgattacagaacatcggcagtacaatttgcagcaaaataaaaatacggctttaaacgagccaaatagggttctcgtagggggaataagatgaatattttaggttttttccagcgactcggtagggcgttacagctccctatcgcggtgctgccggtggcggcactgttgctgcgattcggtcagccagatttacttaacgttgcgtttattgcccaggcgggcggtgcgatttttgataacctcgcattaatcttcgccatcggtgtggcatccagctggtcgaaagacagcgcaggtgcggcggcgctggcgggtgcggtaggttactttgtgttaaccaaagcgatggtgaccatcaacccagaaataaacatgggtgtactggcgggtatcattaccggtctggttggtggcgcagcctataaccgttggtccgatattaaactgccggacttcctgagcttcttcggcggcaaacgctttgtgccgattgccaccggcttcttctgcctggtgctggcggccatttttggttacgtctggccgccggtacagcacgctatccatgcaggaggcgagtggatcgtttctgcgggcgcgctgggttccggtatctttggtttcatcaaccgtctgctgatcccaaccggtctgcatcaggtgctgaacaccatcgcctggttccagattggtgaattcaccaacgcggcgggtacggttttccacggtgatatcaaccgcttctatgccggtgacggcaccgcggggatgttcatgtccggcttcttcccgattatgatgttcggtctgccgggtgcggcgctggcgatgtacttcgcagcaccgaaagagcgtcgtccgatggttggcgggatgctgctttctgttgctgttactgcgttcctgaccggtgtgactgagccgctggaattcctgttcatgttccttgcaccgctgctgtacctcctgcacgcactgctgaccggtatcagcctgtttgtggcaacactgctgggtatccatgctggcttctctttctctgcgggggctatcgactacgcgttgatgtataacctgccggccgccagccagaacgtctggatgctgctggttatgggtgttgtcttcttcgctatctacttcgtggtgttcagtttggttatccgcatgttcaacctgaaaacgccgggtcgtgaagataaagaagacgagatcgttactgaagaagccaacagcaacactgaagaaggcctcaatcaactggcgaccaactatattgctgcggttggcggcactgacaacctgaaagcaattgacgcctgtatcacccgtctgcgcctgaccgtggctgactctgcccgcgtcaacgatacgatgtgtaaacgtctgggtgcttctggtgtagtgaaactgaacaaacagactattcaggtgattgttggcgcgaaagcagaatccatcggcgatgcgatgaagaaagtcgttgcccgtggtccggtagccgctgcgtcagctgaagcaactccggcaactgccgcgcctgtagcaaaaccgcaggctgtaccaaacgcggtatctatcgcggagctggtatcgccgattaccggtgatgtcgtggcactggatcaggttcctgacgaagcattcgccagcaaagcggtgggtgacggtgtggcggtgaaaccgacagataaaatcgtcgtatcaccagccgcagggacaatcgtgaaaatcttcaacaccaaccacgcgttctgcctggaaaccgaaaaaggcgcggagatcgtcgtccatatgggtatcgacaccgtagcgctggaaggtaaaggctttaaacgtctggtggaagagggtgcgcaggtaagcgcagggcaaccgattctggaaatggatctggattacctgaacgctaacgcccgctcgatgattagcccggtggtttgcagcaatatcgacgatttcagtggcttgatcattaaagctcagggccatgttgtggcgggtcaaacaccgctgtatgaaatcaaaaagtaatctgctttatgcctgatgcgacgcttgagcgtcgcatccaacaatgacaagcggtggagatcttctctgccgcttttttttcatcaatcatccccataatccttgttagattatcaattttaaaaaactaacagttgtcagcctgtcccgcttataagatcatacgccgttatacgttgtttacgctttgaggaatccacgatgagtgaggcagaagcccgcccgactaactttatccgtcagatcatcgatgaagatctggccagtggtaagcacaccacagtacacacccgtttcccgccggagccgaatggctatctgcatattggccatgcgaaatctatctgcctgaacttcgggatcgcccaggactataaaggccagtgcaacctgcgtttcgacgacactaacccggtaaaagaagatatcgagtatgttgagtcgatcaaaaacgacgtagagtggttaggttttcactggtctggtaacgtccgttactcctccgattattttgatcagctccacgcctatgcgatcgaactgatcaataaaggcctggcgtacgttgatgaactgacgccggaacagatccgcgaataccgcggcaccctgacgcaaccgggtaaaaacagcccgtaccgcgaccgcagcgttgaagagaacctggcgctgttcgaaaaaatgcgtgccggtggttttgaagaaggtaaagcctgcctgcgtgcgaaaatcgacatggcttcaccgtttatcgtgatgcgcgatccggtgctgtaccgtattaaatttgctgaacaccaccagactggcaacaagtggtgcatctacccgatgtacgacttcacccactgcatcagcgatgccctggaaggtattacgcactctctgtgtacgcttgagttccaggacaaccgtcgcctgtacgactgggtgctggacaacatcaccattcctgttcacccgcgccagtacgaattctcgcgcctgaatctggaatacactgtgatgtccaagcgtaagctgaacctgctggtgaccgacaagcacgttgaaggctgggatgacccgcgtatgccgaccatttctggtctgcgtcgtcgtggttacactgcggcttctattcgtgagttctgcaaacgcattggcgtgaccaagcaggacaacaccattgagatggcgtcgctggaatcttgcatccgtgaagatctcaacgaaaatgcgccgcgcgcaatggcggttatcgatccggtgaaactggttatcgaaaactatcagggcgaaggcgaaatggtcaccatgccgaaccatccgaacaaaccggaaatggggagccgtcaggtgccgtttagcggtgagatttggatcgatcgcgccgatttccgcgaagaagctaacaagcagtacaaacgtctggtgctgggtaaagaagtgcgtctgcgtaatgcttacgtcattaaggctgaacgcgtggagaaagatgccgaaggcaatatcaccaccatcttctgtacttatgacgccgacaccttaagcaaagatccggcagatggtcgtaaagtcaaaggtgttattcactgggtgagcgcggcacatgcgctgccggttgaaatccgtctgtacgaccgtctgttcagcgtgccgaaccctggtgctgcggatgatttcctgtcggtgattaacccggaatcgctggtgatcaaacagggctttgctgaaccgtcgctgaaagatgcggttgcgggtaaagcattccagtttgagcgtgaaggttacttctgcctcgacagccgccattccacagcggaaaaaccggtatttaaccgcaccgttgggctgcgtgatacctgggcgaaagtaggcgagtaattttaagttctaccaggccgggtgaggcatttacgtcgcatccggcaagaaatagcaaacaatcccaaacgccgcactctgcggcgttttttctgcttttcttcgcgaattaattccgcttcgcaatttatccataaaataaatttaaaatcacaaaccataattaaataaaatgtaaccgctttcatcttgctggaaattcacgcttttattcttctgcaagcctttcaaccgcaaacttaagccttgtaacaaaaatcatcaaaatatgtgcggttgctcatgttcttacattctggttacagaaagagattgataattcgcgtcgcgaaaaatagtctgttcctgtagtcagcgagacttttctcaacgctacttttttaatttttattttttcgctgttcacctttggtgcagcaatttatacgtcaaagaggattaacccatgcgtacgtttagtggcaaacgtagtacgctggcgctggctatcgccggtgttacagcaatgtcgggctttatggcaatgccggaggctcgcgccgaaggattcatcgacgattcaaccttaaccggcggtatatattactggcagcgtgaacgcgaccgtaaagatgttaccgacggcgacaaatacaaaaccaacctttctcactccacctggaatgccaacctcgattttcagtccggttatgctgctgatatgttcggccttgatattgctgcgtttacggcgattgaaatggcggaaaacggcgacagctcccacccgaacgaaatcgcgttttcaaaaagtaataaagcctatgacgaagactggtccggcgacaaaagcggtataagcctgtataaagctgcggccaaatttaaatacggtccggtttgggcgagggcaggttacattcagccaactggtcaaacgctgttagcgccgcactggagctttatgccaggtacttatcagggggcggaagccggggcgaattttgattacggcgatgctggtgcgttgagtttctcctacatgtggaccaacgaatacaaagcgccgtggcatctggaaatggatgagttttatcagaacgataaaaccaccaaagttgattatctgcactcccttggggcgaaatacgacttcaaaaataacttcgtactggaagcggcatttggtcaggcggaagggtatatcgatcaatattttgccaaagccagctacaaatttgatatcgccggtagcccgttaaccaccagctaccagttctacggtacccgcgataaagttgacgatcgcagcgtcaacgatctttatgacggcaccgcttggctgcaagcattgacctttggttaccgggcggctgacgtagtggatttgcgccttgaaggcacctgggttaaggctgacggtcagcagggatacttcctgcaacgtatgactccaacctacgcttcctcgaacggtcgcctggatatctggtgggataaccgttccgacttcaacgctaacggagaaaaagcggtcttcttcggtgcgatgtatgacctgaaaaactggaatcttccaggcttcgccatcggcgcttcctacgtttacgcatgggatgctaaacctgcgacctggcagagcaatccggatgcgtactacgacaaaaaccggactattgaagagtctgcctacagcctggatgcggtctacaccattcaggacggccgcgccaaaggcacgatgttcaaactgcacttcaccgaatacgacaaccactctgacatcccaagctggggcggcggttacggtaacatcttccaggatgagcgtgacgtgaaatttatggtaatcgcaccattcaccatcttctgatgcccgacgcggcaggttttgtgcctgccgcacgtttgaggaatttgctatgaaaaaactgattctcatcgccatgatggcatcgggctggtagcttgtgcgcaatcaaccgcgccacaggaagacagtcgtctgaaagaggcatacagcgcctgtatcaacaccgcacaaggttcgccagaaaaaattgaagcctgccagagcgtgttaaacgtgctgaagaaagaaaaacaacatcagcagtttgccgaccaggaaagtgtacgcgtactggattatcagcagtgtctgcgcgcaacgcaaaccggtaatgaccaggcggtgaaagccgattgtgataaagtttggcaggaaattcgcagtaataacaaataagtgagagctgtaactctcgcttttcttatttcccttgcataaaaaagccaacccgcaggttggcttttctcgttcaggctggcttatttgccttcgtgcgcgtgctcatcttcgcggcaatcgccttcggcacagtgaccgtaaagatagagactgtggttagtcaggcgaatgccatgttttgcggcaatttcacgctgacgcgcttcgatggaatcatcactaaattcgataaccttgccgcagtcgaggcagatcaggtgatcgtggtgatgttgctgtgtcagttcaaatacggatttaccgccttcaaaattgtggcgggtgacgataccagcgtcgtcaaactggttcagtacgcgatataccgtagccagaccaatttcttcacccatatcgatcagacgtttgtataaatcttccgcactgacgtgatggttgtccggctcctgaagaacttccaggatttttaaacgaggaagcgttactttcaggccagctttctttagggcggtattgttatcagtcatgcggaatctgtcctgttactaagcggttcacttcattagaagaagtgacagaatttgctcttgagataatgcgtatcattatagaattgccacgcctaaatgaaaaccacaagtccctggcaaatattgttaataaaaacgtggcacagcttacatttacaacggcaaggccacttgaacaccgggacattgtacaggtacaacagcaaaagttacaaatttgtagcaattattttgattggcattatctattaatacggcgtagacatgagtctacgccgcatcacatcaggcattgagaatttcgtcgagatgcaactcttcagaaatctgtttaacccatttttctacacgttcagcggtcagttccggctgacggtcttcgtcgatagccagaccgacaaagtggtcgtcatctgccagaccttttgatgcttcgaaatgatagcccgcagttggccagtgaccaacgatggttgcaccgcgcggttcaatgatgtcgcggatggtgcccaatgcgtcgcagaaatattcggcgtaatcttcctggtcaccacaaccaaacagcgcaaccagtttgccattgaaatcaatctcttcgagagtcgggaagaagtcatcccagtcacactgcgcttcgccgtaataccaggttgggatgcccagcagcagaatgtcataagcttccagatcttctttgctgctttttgcaatgtcatggacatcggcaacgtctttaccaagctgtttttgaatcatttttgcgatattttcggtattaccggtgtcgctgccgaaaaagatgccagtgatagccatgagtgaaataacctcttgaaacttattgaaatgggggtggaaaattgcccacggataaaggcaatcatagcagaacaggcagtcttgcggaatcagcaaacgagcaggactgcacactgtgctacatgaaagtggaaatttaaacgatgccctgactacgcagcgccgccagttgctgcattaacatctcttcgatcagttcgctacggctcatattgcgcgactccgccagctcgttcagcgcctcgacagcttccgcgttcagcttcagttcgacacgcttaaggccacgtactttgtcgcgttttagctggttgcgtttattaatacgcagctgttcatcgcgcgaaagcggattagttttcggtcgtcccggtcgacgctcgtgcgcgaacagatctaatgtcgtacggtccgtttgttctttggccatgatcttggtgacttcgggggaaacaatcagccaggcctctgcccggatggatagcgcgccataatacatcagcgcgatgagtcacgccaacgcccacgcgcggaaagcgacgcggacgctgggtttttaatcagttgcgttaatcattgagatagcgacggatagcgcgtaataccgcatccggtttttcagcatggacccagtgacccgcgcctgcaatcacatgcgcccgtgcctgtggaaattgtgccagtaaatcatcacggtactgctcgctaacatacggagaattgccgccagggataaacagggcagggtgatcccatgccgggattttctcccaacccacaatatgcggatactgatcccacaataccggcacgttaaagcgccactccccgtcaacaaaagatttcaacagaaactgaatcaccccttcttcattaagatgctggcgcattattgctgctgcttgctggcgagtttgtgcgtccgattcactgaccgcgttgatagccgcgaaaatctcatcatgacggcgtacgtgatagtcgaccggtgcgatatcgatcgccaccagtttatcgatgcgatcgggggccagtgcagtaagtgccattaccgctttaccgcccatggagtgaccgataaatgttgctttgtcgatctgcagtgcatccagggtatcaacaagatcctgcgccatcgccgggtaattcattaccggctctctcggtgaaagaccgtggttacgcatatcaacctggatgatattgtgatcgtttaccagatcgcgagccagtacgccaaggttgtcgaggctaccaaacagaccatggacaagaacgatgggagaattattgtgctggttttgtgcagtttgcgcgcggatattcaatttcatggcaaagttctttttttcgcgttgtcgggttagggtattatgttgaccattgtgccacagggctgcaacaaataaggtttattccgagtttttctgcaagccaggcttgacgctatccgctgccgggatttattcatatactcctggcgacttgtattcagctaagacactgcactggattaagatgaaaacgattgaagttgatgatgaactctacagctatattgccagccacactaagcatatcggcgagagcgcatccgacattttacggcgtatgttgaaattttccgccgcatcacagcctgctgctccggtgacgaaagaggttcgcgttgcgtcacctgctatcgtcgaagcgaagccggtcaaaacgattaaagacaaggttcgcgcaatgcgtgaacttctgctttcggacgaatacgcagagcaaaagcgagcggtcaatcgctttatgctgctgttgtctacactatattctcttgacgcccaggcgtttgccgaagcaacggaatcgttgcacggtcgtacacgcgtttactttgcggcagatgaacaaacgctgctgaaaaatggtaatcagaccaagccgaaacatgtgccaggcacgccgtattgggtgatcaccaacaccaacaccggccgtaaatgcagcatgatcgaacacatcatgcagtcgatgcaattcccggcggaattgattgagaaggtttgcggaactatctaaaacgttgcagacaaaggacaaagcaatggcaatccacaatcgtgcaggccaacctgcacaacagagtgatttgattaacgtcgcccaactgacggcgcaatattatgtactgaaaccagaagcagggaatgcggagcacgcggtgaaattcggtacttccggtcaccgtggcagtgcagcgcgccacagctttaacgagccgcacattctggcgatcgctcaggcaattgctgaagaacgtgcgaaaaacggcatcactggcccttgctatgtgggtaaagatactcacgccctgtccgagcctgcgttcatttccgtactggaagtgctggcagcgaacggcgttgatgtcattgtgcaggaaaacaatggcttcactccgacacctgccatttccaatgccatcctggttcacaataaaaaaggtggcccgctggcagacggtatcgtgattacaccgtcccataacccgccggaagatggtggtatcaagtacaacccgccaaatggtggcccggctgataccaacgtcaccaaagtggtggaagacagggccaacgcactgatggccgatggcctgaaaggcgtgaagcgtatctccctcgacgaagcgatggcatccggtcatgtaaaagagcaggatctggtgcagccgtttgtggaaggtctggccgatatcgttgatatggcggcaattcagaaagcgggcctgacgctgggcgttgatccgctgggcggttccggtatcgaatactggaagcgtattggcgagtattacaacctcaacctgaccatcgttaacgatcaggtcgatcaaaccttccgctttatgcaccttgataaagacggcgcgatccgtatggactgctcctccgagtgtgcgatggcgggcctgctggcactgcgtgataagttcgatctggcgtttgctaacgacccggattatgaccgtcacggtatcgtcactccggcaggtttgatgaatccgaaccactacctggcggtggcgatcaactacctgttccagcatcgtccgcagtggggcaaagatgttgctgtcggtaaaacgctggtttcttctgcgatgatcgaccgtgtggtcaatgacttgggccgtaagctggtagaagtcccggtaggtttcaaatggtttgttgatggtctgttcgacggcagcttcggctttggcggcgaagagagcgcaggggcttccttcctgcgtttcgacggcacgccgtggtccaccgacaaagacggcatcattatgtgtctgctggcggcggaaatcaccgctgtcaccggtaagaacccgcaggaacactacaacgaactggcaaaacgctttggtgcgccgagctacaaccgtttgcaggcagccgcgacttccgcacaaaaagcggcgctgtctaagctgtctccggaaatggtgagcgccagcacccttgcaggcgacccgatcaccgcgcgcctgacggcggcaccgggcaatggtgcttctatcggcggtctgaaagtgatgaccgacaacggctggttcgccgcgcgtccgtcaggcacggaagacgcatataagatctactgcgaaagcttcctcggtgaagaacatcgcaagcagattgagaaagaagcggttgagattgttagcgaagttctgaaaaacgcgtaaacacatttaataaaaaaagggcggtcgcaagatcgcccttttttactttgcttttttaaccgtgtttatttttcagttcaaagcgtggtgataccagaccatacagtgtccaaccaaggaaggtcacgatggaaccgtacagcatggcttcttccccggatgagtacagcgcataaaagctatacatcgcgccaacaaaagcaacaaagtttgcaactttcgcttttgaggggggcacattagcgaccttctgaataatgactaatgccgccattgacagaatatacggaatgatattggtcaccacggccaggttaaccagcacgttgaactgactgtttagcgacgggctaatcgtcatcagcgccaacccgctctggataatcacaatggtcaacattccctgcaccggtgcatccactttggttacacgggagaaaattttagggaagtagccttcatcagatgaagatttaaacacctgggcaatggtgaactgccagccaagcagcgaaccgcagcaggacatcaccatcagcgccataatgactttacccacttctggtgtgaacatctgtgcgaaggccaggccaaatggtgccgttgaatttgccagctccatattaggcacaatccctgcaatcacgttggtggagacgatataaatcaccgccgcacctaacgtaccgccgagtaccgcgattggcacattacgttccgggttttccactacatcagtattcgcacacgcagactccagaccgagaaaagcccacagcgtcatagcgatggaagaacctactgcactgaagaacggtgcatgatgcggattccaggaatcaacgtaaagcgtcgggctaaaccagaaccagccgataatgcacaggcctaccaccggaataatgaccccccacacagtaatgctactgatttgcccggtaatgcgcgcaccaccaaagttagccacggtacaaatccacagcactccgatggtcgcaagaccaatctgcactggcgacaaactcgcgccgagcagttcggtgccgtaaccaaccgccgaaatagcaatcgcgacgttagcaatcagcagcgagacaccgtaggtgtagttcgccataaaattgccggacttaccgaaagcatactcggcataaccgcccataccacctgatttacggctgaacataccgcattttgcgaatgcccatgccagtgccattgagcctacggctgtcaccagccaggagataattgaaattgtcccaacttcggcaagctttgtcggcagcatgatgataccggagcccatcatgttgaccatcgtcagtatggttaactgaacgacgcccattttgttcgatttagcctgactcataatttttcccctttcaacagggtactttgcgcatcacgaggcttgatgacatagcaccaaacttgcttacgaccatcatgttcttcgatatagacaccctgaagctccggtgcaaaacctggcaacaggttgatcccttcttccagagcgctgaagtaacgcagaacagcaccaccccagatttcacccggaacaacgcacagcacacccggaggataaggaagcgcaccttcggcagcgatacggccttctgcatccggcagacgaaccagctccacttcaccgcgtaaataggcgtagttggcttcttgcggattcatgcttacgcgtgggaagtgttccttacggaacatctctttttgcagttgtttcacgttgtgacgggcatacaaatcatgcatttcttgacacaactgacgcagggtataaccggcgtagcgctcttcatgctgtttgtagatggaaggcagcacttctgctaatggcgcgtcggactcaagcagtttttcgaagcgtaccagcagggcaacaagttgctgaagcttggccatatcttctgccggagtcagcaggaagaggatggagttaagatcgcatttttccggcactacgccattttcgcgcaggaagttagcaagaatcgtcgcgggtacaccgaacgcttcatattcgccgttacgtgcatcaatacctggggttgtcagcaacagtttgcaaggatcgacaaagtattgattctctgcatagccttcaaaagaatgccagtgttcccctggtacaaactggaagaagcgcagatcaaccgcaatttgcgctgtttcatacgactgccagggtttaccatccaccagttcaggtacgaacggacgaatatgctgacagttatcgaggatcagtttgcgggcattaatgccatttaccacacaatccatccacatattacgaccgctgacaccttcatgcattttggcgttgatatccagtgcggcaaacagcggatagaacgggctggtggaggcgtgcatcataaaggcgttgttcatgcgtttgtgcggtacataacgctgttgccctttgatgtggctgtcttttttatggatttgtgaagtttgagaaaaaccagcctgctgtttatgtacggattgcgtaaccagaatacccggatcgttctcattaagatccagcaacagcggcgaacagtcagccatcatcggaataaactgttcatagccgacccatgcggagtcaaagaggatgtagtcacacagatgaccaattttatccaccacctgacgggcgttataaatcgtaccgtcgtaagtgcctagctgaataacggcgaggcggaaaggacgagcctcttttgcccgctgcggtgcaacttctgtaatcagctcacgcaggtaactttcttcaaaacagtgcgcatcaatgccaccgataaagccatacgggttacgtgcggtttccagataaaccggtgtcgcgccagcctgtagcaacgcaccgtggtggttagatttatggttattgcggtcaaacaacaccagatcgcccggcgtcagcaatgcgtttaagaccactttattagaagatgaagtaccgtttaaaacgaaataggttttatcggcattaaagactttagccgcatgctgttgtgcaatacatggcgcaccttcatgaatcagcagatcgcccattgctacgtcagcattacacaagtcagagcggaagagcatttcgccaaagtattccacgaactgattgcctgccggatggcgacggaaaaactcacccccctgatgaccagggcagtcaaaagcactattgccctgattaacataatcgaccagtgcgcggaagaagggcgggcgcagttgcgtttcataatggctggcagcggtttctaactgacgtccataaaactctttacgtgattcgcaatgttcgaagacaccagaaatacgtggcagatattctgcgggtacacgttcttcattttccgttgcaataaaaacaggaatgtcatagccagtagcgtctatttcatcgagttttccacgttcaacatcactgactgataaaataatggcggcaacgtcaatataattactttcgtctatattcacgcatgcacgatgagtggaaaaacaatccgggcaagaacgactaacggcaatttttaattctgacattttgttcatctctttatttcaggtaatagcaggtcctcaatttctcaaaggagaaatcgatcacgccggaaaaaagcaaagctccaccgctgataaataaatcagtagtttgctttttgcagatgcaataacccagaccagcccggtaactggctatactcgtcatacctcaagttgcaagtgctgcgactcgaattatttagagtttaaaagggttagcagtatatgagcaccgaggaatacaggtattaacctgtaatgcttaaagtcagggagacctgtacgttggggtgccctttagtcagaagactagcgggcattaaagaaatgaaagtcaaaactattacgatgggcaaacttcatgatatgggttgtccgccttatatgaggcattaagcggttattattttccatttacctttacctcttgctgtgtcagttgaaggtagagttattctatccatgaaatggctataatctgtgaagaagatcaacaaaaaacgatcataccccaaataataaatcattaattatgaatagcgccatattagatgctgttttgttatttaaatgttgtaattttgtgttttatatttgcgttaagaaattaaacctgccaaataataatatttttggcaggtttaataataaattaataattatttaagcgcatttattgaataaacattcatggcataaaccgatacccaataccggtttcagtaatgaaatggcgggggcgagcgggatcctgttccagtttttgtcgcagatgtcccatataaatacgcaaatagtgactgtgttcgaccgcgtttggcccccacacctgattgagtaactggcgctgggtgagcactttcccggcattattcagcagcaccgccagcaggcggaactcaatcggcgtgagatgcacctcttcctcaccccggtgaatcacgcgggcggctaaatcgacggtaacatcggaaaatttcaccagcggatcgggcgcggcggtggcggagtggcggcgtaaagcgacgcgcagacgggcctgcaattcgccaatgccaaacggcttactcagataatcatccgctccggcatccagcgcggcgatcttgtcgctctcttcgctgcgtgcggaaagcacaatcaccggcaccgcgctccactggcgcaggtcgcggataaactcaatcccatcaccatcgggcaggccgagatcgagaataatcaaatctggcttacgggtagccgcttccagcaagccgcgttgcagcgtttcggcctcatagacgcgcatcccgtcgccctccagcgccgtgcgcagaaagcgacgaatagcctgttcatcttcaacaatcagaacgtttgtcacatatcctcatgaaagtcttcaagttcaggagcggtttgctggggaagtgtaacacgaaaacaggcaccaccttccggtcggttgaacgcggtaatagtgcccccgtgtacatccactatcgcccgacaaattgccagtccaagccctacccccggtactgccgactctttattcccgcgagcaaacttatcaaatatcgtctgctcctggcctggcggaagaccggggccgttatcccagacatccagttgtagattttcgccctcaacgtgggcatcgataccaatttcggcctgcgcacccgcatatttcaccgcgttctccagcagattaatcagcacccgttcaaagagtggcccgtcaacgtggattaaggtcagcggttctggcagagaaagattgatgggcgacgataaacccggttccagcatttgcagcgcgctgccgactacttcttccagcgttaaccactctttcttcaaattaaagccgccggactgaattcgcgccatatccagtagattattcaccagtcgggtagtgttcagcacatgctgacgaatctcgctggcctggcgggcgtggggcgatccttcgcttgccagatcgagcgttaagatttctgcctgaccaaacagcaccgtaagcggcgtgcgtaaatcatgcgaaagcgccgccagcagggcgttgcggatctgttcacgttcgcttgccatccgcgcctgttcttcactggcggtcagcgtcagccgctcaaacgcattggcgactaacagcgtaaacgtctctagcaggcgctgctgctccgggatcatcaactgacgcagattccccggttccaccaccaccagtccgtaggttttctcgccgctttttagcggcaaaatctggtacggcacgccgggtaacgtgtcggtgcccgcacccgcaggcaggcctttatcaaaactccactgcgcgatggcatcgtcccatggcgtcattccttgcggatgtgttaacggctgcaatttaccgttgtcatcgggcaacaacacctgactgcgggcatgaaacgtggaggcaataaattgttcgctggtggcggcgatgtcctgcggactgcggcccaccgccagagctttcgacatttcatataagtgccgtgtgcgttgctcgcggtaacgggctacccgcgcctgataacgcacacccgcagtaaggttcccgatcaccagcccgacggttaacatcaccgcgaaggtcagcagatattgcacatcagagacagcgagcgtgccgcgtggggcgataaaaaagagatcgaaactcaccacattaatgacggtagcaaccaccgaaggccagcgtccataaaatagcgccaccaccaccacgccaagcagatacagcatcaccaggttggcggcatcaaacgccatcagccactgcatggcaattaaagtgataacggcgcataacgcggcggcaaccacgcatccctgaatctgtacccgccacttgtctttaaaagagcggctatccggcgcgttgttaatcgtgcgggcgggtggttcatcaagcgcgaccagcacctgatcgagatcgggggcgatgcgcgccagtcggtcagcaaacgtttcccgacgccaccagcggcgcgaggccgggcgaccgagaataatcttgccgagattatgttcacgggcataacgcactactgctttttcttccgctggatcagaaagtgtagccgtctccgcgcccagctcctgcgccagacgtaaggcgctgagaattgcccgacgttttttttccggtaagcgatgcagggcaggggtttcaacatacaccgcgtgccagacgctacccaggcgcgaggccaaccgcgccgccgcgcggaccagtttctcactgccggtgttatgcccgatgcataaaaggatcgcgtcgcgcgtgtgccacactttctcttcaccaggatgcccccgccaggcgcgcatttgctcatctacgcgatcggcagtacggcgcagtgccagttcacgcagggcgatcagattgcctttgcggaaaaaatgttcaatggcgcgctccgcctgcccggcaatatagactttgccttctttcagccgctggcgcagatcgtccgggggcaagtccaccagcactacgtcgtcggcggcatcgaaaaaaggatcgggcacggtttcccgtacctgaattccggtgacgccgctgaccacatcattcaggctttccagatgttgaacgttgacggtagtaaaaacatcaatgcctgcttccagcagctcttcaatatcctgccagcgtttgggatgacgagaaccaggcgcattactgtgcgccagttcgtccattaagatcagcgccggacggcgggcgagggcggcatcgagatcaaactcgctgatatgccgcccacggtacgccaggcgttttggcggcagaacagccagcccttccagcatggcggcggtatctttccgcccgtgggtttctaccacgccaaccacaatatccagcccttgcgcccgcagtcgctgggcttctgccagcatcgcccaggtcttcccgacgcctgcgcaggcaccgaagaaaactttcagcttcccccgatgcggcgcggcagtttgttccagcagacgatcggggtcgggacgtaagggttcgttattcatcaagtttatccagcgccagattgagtttgacaatgttgacgaccggctggccgatatatttcaccagtggttgttggctgtattttgcgatcagttgcgtgagctgttcaacgctgagattacgcgctttcgcgatgcgtgggatctgccaggccgccgcttgcggggtgatattattgtccagcccgcttgccgatgccgtcaccagttcaaccggaatgctcgcgctggcatccgggttagcggcccgtaatgcagcaacgcgtgcggctattagtttatccagctcagggttactgaccgccagattgctcccgccagaagcctgtggattatagggcatttctgccgttgccgacgggcgaccatgaaaatagccgttgccggtaaaattctgcccgattaatgccgaaccccgcactgtatcaccttcacggatcaacgaaccgttggcctgccagggaaaccaccattgccccagcacggtggtcagcagcgggtaaacgccgccagtaatcaataacagaaagataaatgtcgataatgccggacgtaatccacgcatggtaaacctcacaccagaccgcaaacggtcagcagtaaatcaatgactttgataccaataaacggcaccagcagcccacccagaccgtaaatccataagttacggcgcaacatggcagaagcggtaagcggtttataactcacgccttttaacgccagaggaatcaaaaagacgataatcaaggcgttgaaaatgaccgcactgagaatggcggagtcgggcgaatgaaggcgcatgatgttcagcgcatttaactgcggatacgttgccgcgaacgccgccggaataatggcgaagtatttcgccacatcgttggcaatgctgaaggtggtcagcgagccacgggtcatcagcatctgtttgccaatatgtaccacctcgatcaacttggtcgggttagagtcgagatcgaccatattgcccgcttctttcgccgcctgagtaccggagttcatcgccaccgcgacatctgcctgcgccagcgccggagcatcgttggtgccgtcgccggtcatcgccaccaaacggccttccgcctgatactgacgaatcaatgccagcttggcctccggtgtcgcttcggcgagaaaatcatcgacgcccgcttccgcagcaatggcggcggcagtcagacggttatcgccggtaatcatcaccgttttaatgcccatttggcgcagttgcgcgaagcgctctttaataccgcctttgacgatatctttcagcgcaataacgcccagcacacgagaaccttccaccaccaccagcggcgtggctccctgacgcgcaacctgatcgactttttgatcaacatcggtagggaagtgaccaccgttagcctcaatatggcgacgaatggcatcgacagaacctttacggatcatgcggttgtcgatgttgatcccgctcatccggctttgcgcagtaaacggtacaaaggtggcatggagcgactgcacatcgcgctcgcgcaggttaaaacgctgcttggcgaggatcacaatactgcggccttccggcgtttcatcagccagcgaagccagttgtgcggcgtcagccagcgttttttcatccacgccctgcgcagggataaactccgacgcctgacggttaccgagtgtgatggtgccggttttatccagtagcagaacgtcaacgtcacctgccgcttcaactgcacgtccgctggtggcaatcacattcgcgcccagcatccgactcatcccggcgacgccgatcgctgacaacaggccgccaatagtggttgggatcagacagaccagcagcgccaccagtaccgttacactcacggcattaccgccccacgcggaaaacggccacagcgtggcggttgccagtaaaaagacgatggtcagagcaatcagcaggatagtcagggcaatctcgttcggtgttttgcgtcgctgtgcgccttccaccatcgcgatcatccgatccagaaatgtctcaccggggttaacgctacactcaatcaccagccagtcagaaagaatacgcgtgccgccggtgacggaggcaaaatcgccgccggattcacggatcaccggtgccgattccccggtgatggcgctttcatcgaccgatgcgccgccttcaatgacttcaccatcgcaggggataatatcgccagcttctaccagcacgatgtcacctttacgcagttgatcggcaggaactttgtccgccgcagcgccatatttcggctcacgcatcttgcgggcaaaggcagtttttttcacccctttaagactgttggcctgcgctttactgcggccttctgccagcgcctcggcgaaattagcgaacagtacggtgacccacagccagccgctaattgccgcgctaaacagcgcattgccaggcatcgcaccgcttgccatcgcgatgctaatacaggtggtcagcagactgccgatccagacgataaacatcaccggattgcgccattgcgcctgcgggtttaattttttcaccgcttctttcagcgcctgaacgacaagtgttggttcgaatagcgccagttgtttacgactcatattcagtgctcactcaatatcatcaggagagatattccgccaccggaccaagcgccagggcagggataaaggtcagtgcgccaaccagcaacacggtgccgattaacaggccaacaaacagcgggccgtgcgttggcagcgtgccggagctggcgggttggctctttttactcaccagcgaaccggcaattgccatcaccgggataatcaccccgaagcgaccgacaaacatgcagaacgccagtaaacagttccagaacggggagttggcgcttaatccggcaaaggcgctgccgttgttgttagcggcggatgacacggcgtacagcacttcgctaaaaccatgcgggccagggttgagcatggcgctacgtccggcgtcggtcatcattgccagcgccgcgcccatcagcaccagcgtcggggtaaccagaatcgccagtgcagtcagtttcatctcgcgtacgtcgatttttttacccagatattccggtgtacgaccaatcatcagcccggcaataaacaccgccagcaggacaaacagcatcatgccgtaaagaccagaaccgacaccgccgaacaccacttcaccaatttgcatcagccacatcggcaccatgccaccgagagcggtaaacgaatcatgcatcgcaatcaccgcgccacaggaagccgccgtagtcacgaccgcaaacaggctactgaccagcacgccgaaacggctctctttaccttccatattgatgctgctgtctgcgccgagcgccagcagatgaggattaccctgaacttctgcccacatcaccacgcctacgcagatgacaaaaatcactgacatcgcccacagcaacatgcgcccctggcggcgatcgcccgtcacttcaccaaaggcaaagcacagcgccgttgggatcaagaagatcgccagcatctgcacgaagttggtcagtgcggttgggttttcaaacggatgcgacgagttggcattaaagaagccaccgccgttagtaccgagcatcttgatcgcttcctgagaagctacaggccccatgggtaacagctgttgcgctccttcaacggtattcacagcctgataaggctgaaagttttgcagcgcaccttgttgaataaaaaacagtgcgatcaacaacgccacagggacgagcacccataacgtgatgcgtagcagatcgacccaggcattcccgagtgtgctcatgctctggcgggtaaacgcacggatgagggcaaaaatcaccgcaatcccgctggcggcagaaagaaagttttgcaccgttaagccagccatctggctgaaatagctcaacgtggtttcaccgctgtaagattgccagttggtattcgtgacaaagctgacggcggtattcagcgccagatcccacgacagccccggcaactgctgtggattaagcggcagatagtgctgaccgagcaacataaaaaacagcaccgccagccccagcatgttcaggccgagaatggcacaaagatattgcttccagttcatctcatggtcagagacgccaggtaaacgaaagagtatacgttcaacgcccgctgtacctggaagaggaatgtcattaatcagccgcgccagcccgctgcctaaaggacgcgccagcaccattaacaccagtaaaaacgtggcgatcagtaagaacccttgcgcagccatcagaacgcctccgcattgatcagggcataaaccagataacccagtaataaaaacaccagcaatacgccggttatcacgcctgcactcacagtgcacctccagtggcctaaaagtgataccggaagggtagaattctggctgcaaagatttcgcaaaaatctgcgggcggggtgtaaaaaaagtataaaaatggcaaaagccatgatttaactaatgtttagtattaatttaacttttgtgtaacttaattacaggatgaatgtaaataaaccatcaataagcaaaaataagtggtcggatgagtagtaaaattacacaaaaggcggtactattttcatcagataaacaaattcatttttccggtgccattcaccgggtagatacaaaagggggagaaaagtatggaactctacagagaatatcctgcatggcttatctttttacgccgtacttatgcggttgcagcgggcgttctggcgctgcctttcatgcttttctggaaagaccgcgcccgcttttacagctacctgcatcgcgtctggtcgaaaaccagcgataaaccggtgtggatggatcaggccgaaaaggcaactggtgatttttattgattgctgagttttgaatacattgaaaaccgccagcggaaacgctggcggttttttgtatcaggaagatgttcagaggaatatttagacatcgttataccaatcgaaacatatattcatgaaatatatataaatattttcctaattgttcttatctgacagatatctcacttaaggctttcttataaatctgtagggttttgcctggaagcagacaaataacccgataaaacaaggatgagcagatgagcggaaaaccggcagcgcgtcagggcgacatgacgcagtatggcggtagcattgtccagggttcagccggggtgcgcatcggtgcccccaccggcgtggcctgttcggtgtgccccggcggggtgacgtccggccatccggtcaatccgctgctcggtgcaaaggtccttcccggtgaaaccgacatcgccctgcccgccccgctgccgttcatcctctcccgcacctacagcagttaccggacaaaaacgcccgcgccggtggggagcctcggccccggctggaaaatgcctgcggatatccgcttacagctgcgcgataacacactgatactcagtgataacggcggcagaagcctgtattttgagcacctgtttcccggtgaggacggttacagccgcagcgagtcactgtggctggtgcgcggcggcgtggcgaaactggatgaaggtcaccggctggccgcactctggcaggcgctgccggaagaactccgcttaagtccgcatcgttatctggcgacaaacagtccgcaggggccgtggtggctgctcggctggtgtgagcgggtgccggaagcggatgaggtgctgcctgcgccgctgccgccgtaccgggtactgaccgggctggtggaccgcttcgggcgcacacagacgttccaccgcgaagccgccggtgaattcagcggcgaaatcaccggcgtgacggatggtgccgggcgtcacttccggctggtactgaccacgcaggcgcagcgggcagaagaagcccggcagcaggccatttccggcgggacggaaccgtccgcttttcctgataccctgccgggttacaccgaatatggccgggacaacggcatccgtctgtctgccgtgtggctgacgcacgacccggaatacccggagaatttacctgccgcgccgctggtgcgctatggctggacgccacgcggcgaactggcggcggtgtatgaccgcagcaatacacaggtgcgcagctttacttacgatgataaataccggggccggatggtggcgcaccgtcacacgggccggccggaaatccgttaccgttacgacagcgacgggcgggtgacagaacagctaaacccggcaggcttaaactacacgtatcagtatgagaaggaccgcatcaccatcaccgacagcctggaccgccgtgaagtgctgcacacgcagggcgaagccgggctgaagcgggtggtgaaaaaggaacacgcggacggcagcgtcacgcagagtcagtttgacgccgtgggcaggctcagggcacagacggatgccgcaggcaggacaacagagtacagcccggatgtggtgacgggcctcatcacgcgcatcaccacgccggatggcagggcatcggcgttttactataaccaccacagccagttaacgtcagccaccgggcctgacgggctggaaatacgccgggaatatgatgaatccggccgtctgattcaggaaaccgcccctgacggcgatatcacccgctaccgttatgataatccacacagtgacctcccctgcgcaacggacgatgccaccggcagccggaaaaccatgacgtggagccgttacggccagttgctgagcttcaccgactgttccggctaccagacccgttatgaccatgaccgcttcgggcagatgacggcggtgcaccgcgaggaagggctgagccagtaccgtgcatacgacagccgtggacagttaattgccgtgaaagacacgcagggccatgaaacgcggtatgaatataacgccgccggtgacctgaccaccgtcattgccccggacggcagcagaaacgggacacagtacgatgcgtggggaaaggccatctgtaccacgcagggcgggctgacgcgcagtatggaatacgatgctgccggacgggtcatccgcctgaccagtgaaaacggcagccacaccaccttccgttacgatgtactcgaccggctgatacaggaaaccggctttgacggccgcacacagcgttatcaccacgacctgaccggcaaacttatccgcagcgaggatgaggggctggtcacccactggtactatgacgaagcagaccgcctcacgcaccgcaccgtgaatggcgaaaccgcagagcggtggcagtatgacgaacgcggctggctgacagacatcagccatatcagcgaagggcaccgggtgacggtgcattacgggtatgatgagaaaggccggctgaccggtgagcgtcagacggtgcatcacccgcagacggaagcactgctctggcagcatgagaccagacatgcgtacaacgcgcagggactggcgaaccgctgtataccggacagcctgcccgccgtggaatggctggcctacggcagcggttacctggcaggcatgaagctcggcgacacaccgctggtggatttcacccgcgaccgcctgcaccgggaaacgctgcgcagcttcggccgttatgaactcaccaccgcttatacccctgccgggcagttacagagccagcacctgaacagcctgcagtatgaccgcgattacacctggaacgacaacggcgaactcatccgcatcagcagcccgcgccagacccggagttacagctacagcaccaccggcaggctgaccggcgttcacaccaccgcagcgaaccttgatatccgcatcccgtatgccacagacccggcaggtaaccgcctgcccgacccggagctgcacccggacagcaccctcagcatgtggccggataaccgtatcgcccgtgacgcgcactatctttaccggtatgaccgttacggcaggctgacggagaaaaccgacctcatcccggaagggggtatccgtacggatgatgagcgcacccaccggtaccattacgacagtcagcaccggctggtgcactacacgcggacacaatatgcagagccgctggtcgaaagtcgctatctttacgacccgctgggccgcagggtggcaaaacgggtgtggcggcgtgaacgggacctgacgggctggatgtcgctgtcacggaaaccgcaagtgacctggtacggctgggacggcgaccggctgaccacaatacagaacgacagaacccgcatccagacgatttatcagccggggagcttcacgccactcatcagagttgaaaccgccaccggtgagctggcgaaaacgcagcgccgcagcctggcggatgcgcttcagcagtccggcggcgaagacggtggcagtgtggtgttcccgccggtgctggtgcagatgctcgaccggctggaaagtgaaatcctggctgaccgggtgagtgaggaaagccgccgctggctggcatcgtgcggcctgaccgtggagcagatgcaaaaccagatggacccggtgtacacgccggcgcgaaaaatccacctgtaccactgcgaccatcgcggcctgccgctggcgctcatcagcacggaaggggcaacagcgtggtgcgcagaatatgatgaatggggcaacctgctgaatgaagagaacccgcatcagctgcagcagcttatccggctgccggggcagcagtatgatgaggagtccggcctgtattacaaccgccaccgctattatgacccgctgcaggggcggtatatcactcaggatccgattgggctgaagggggatggaatttttatcagtatccgttgaatccgatctcaaatatagatccattaggattagaaacactaaaatgcattaagccactgcattcaatgggcggaactggtgaaagaagcggtccagatatatgggggaatccgttctatcatcaatatctttgtgtcccagatggtaaaggggactatacttgtggtggccaagaccaacggggagaatcaaaaggagatggtctatgggggccaggtaaagcaagtaatgatacaaaagaagctgctggccgttgtgacctcgttgaaaccgataatagttgtgtggagaactgtttaaaagggaagtttaaagaggtaaggccgcgttattctgtattgcctgatatattcacacctataaatttagggctatttaaaaactgccaagactggtctaatgattctttagaaacatgtaagatgaagtgctccggaaataacattggacgttttattagatttgtattcaccggagtgatgtaatgaaatatattatttttttattcagagctatatggctggctttatcgcttttaatactattcttttccatgcatagactttcactattagactccactcgtgatgtgagcgagttaattagtctcatgtcttatggaatgatggtaatatgttttccaacaggcatagtattctttattgctctaatatttatagggactgtatcagacattattggcgtaaggattgatagtaagtatattatggcgataataatatggctttattttctgtcaggagggtatattcaatggtttgtattaagtaagcgcattataaacaaataaattaagttaattgctcttattattatatgtaacctgggcattgatatcccgtatgccacagacccggcaggtaaccgcctgcccgacccggagctgcacccggacagcaccctcagcatgtggccggataaccgtatcgcccgtgacgcgcactatctttaccggtatgaccgttacggcaggctgacggagaaaaccgacctcatcccggaagggggtatccgtacggatgatgagcgcacccaccggtaccattacgacagtcagcaccggctggtgcactacacgcggacacaatatgcagagccgctggtcgaaagtcgctatctttacgacccgctgggccgcagggtggcaaaacgggtatggcgacgtgaacgggacctgacgggctggatgtcgctgtcacggaaaccgcaagtgacctggtacggctgggacggcgaccggctgaccacgatacagaacgacaggagccgcatccagacgatttatcagccggggagcttcacgccactcatcagggttgaaaccgccaccggtgagcaggcgaaaacgcagcgccgcagcctggcggatacccttcagcagtccggcggcgaagacggtggcagtgtggtgttcccgccggtgctggtgcagatgctcgaccggctggaaagtgaaatcctggctgaccgggtgagtgaggaaagccgccgctggctggcatcgtgcggcctgacggtggagcagatgcaaaaccagatggacccggtgtacacgccggcgcgaaaaatccacctgtaccactgcgaccatcgcggcctgccgctggcgctcatcagcacggaaggggcaacagcgtggtgcgcagaatatgatgaatggggcaacctgctgaatgaagagaacccgcatcagctgcagcagcttatccggctgccggggcagcagtatgatgaggagtccggcctgtattacaaccgccaccgctattatgacccgctgcaggggaggtatatcactcaggatccgattgggctgaagggggatggaatttttatcagtatccgctgaatccggttcagtatatagattcaatgggactggcatcaaaatatggacacttaaataatggcggatatggagcgagacccaacaaaccgcctacgcccgatccaagtaaattgccggacatagcgaaacaattaagactgccatatcctattgaccaggccagtagtgcgcctaatgttttcaaaacattcttcagagcattaagcccttacgactacacactgtattgcaggaagtgggtaaaaccaaatctgacttgtacgccacaggatgattcccagtatccagggatggatataaagacagcaagtgattacctgccacagacaaattggccaacaactcaattaccaccaggatatacttgtgcagaaccctatttattcccagacattaataaacccgatgggccagcaacagcagggatagatgatttgggtgaaattttagctaagatgaaacagagaacatcgagaggaataagaaaatgaaaagagttttgttctttttgctgatgatatttgttagttttggtgttatagctgattgcgaaatacaagctaaagatcatgattgttttactattttcgctaagggtactattttttccgcgtttcctgtcttaaataataaagccatgtggagatggtatcagaatgaggacatcggtgagtattattggcaaacagaactgggtacatgtaaaaataataaattcacaccaagcggggtgagactcttaattcgcgtcgggtcactacgccttaatgaaaatcatgccatcaaaggaacgttgcaggagttgataaatacagcagaaaaaacggcgtttctcggcgatcggtttagaagttatataagagcgggtatctatcaaaaaagagcagtgatccagttcagttgttggcagtccttgataattcaatcatggtaaaatattttaaagatgagaaaccaacttatgctcgaatgacagcacatctcccgaacaaaaatgagtcttacgaatgtttaataaagatacagcatgaactaattcgtagtgaagagaaataaaatctcttcctgagaaaacaaattaatcattgtgaaaaattatataactcatggaataggtgtttattttgcgttccatttgcagggaaagatcacgtaacgctacttttttgtactaaataattcgaattttaagttcaacaattgagatactacttattgtctaaagctgtttttcatagcttatacatgatcaaatactccttacataaataaggtgaacaaatggaacttaaaaaattgatggaacatatttctattacacccgattacagacaagcctggaaagtggtgcataaattgtcagatattctactgttgactatttgtgccgttatttctggtgcagaaggttgggaagatatagaggatttcggggaaacacatctcgattttttgaagcaatatggtgattttgaaaatggtattcctgttcacgataccattgccagagttgtatcccagggaaagatcacgtaacgctacttttttgtactaaataattcgcattttatgtttaaaaattgagatattccttattacctaaagctgtttttcatagcttatacatgatcaaatactccttacataaataaggtgaacaaatggaacttaaaaaattgatggaacatatttctattattcccgattacagataagcctggaaagtagagcataaattgtcaggcatcctactattgactatttttgccgttatttctggtgcagaaagttgggaagatatagaggatttcggggaaacacatctcgatttcttgaagcaatatggtgattttgaaaatggtattcctgttcacgatactattgccagagttgtatcctgtatcagtcctgcaaaatttcacgagtgctttattaactggatgcgtgattgccattcatcaaatgataaagacgtcattgcaattgatggaaaaacgctccggcactcttatgacaagagtcgccgcaggggagcgattcatgtcattagtgcgttctcaacaatgcacagtctggtcatcgggcagatcaagacggataagaaatccaatgagatcacagctatcccagaacttcttaacatgctggatattaaaggaaaaatcatcacaaccgatgcgatgggttgccagaaagatattgcagagaagatacaaaaacagggaggtgattatttattcgctgtaaaaggaaaccaggggcggctaaataaagccttcgaggaaaaatttccgctgaaagaattaaataatcccaagcatgacagttacgcaattagtgaaaagagtcacggcagagaagaaacccgtcttcatattgtttgcgatgtccctgatgagcttattgatttcacgtttgaatagaaagggcagctatggttagaaactacctgacgtcagtccttgcggggagcaggctttcgtaaatttgtcctgctacaacaggattaacttcacaaatatcatttctcaacgtctacacttactcctgtaaaccgttcaggagcagtaatgaatcagcaacgatttgatgacagcaccctaatccgtatcttcgcccttcatgagttacatcgactgaaagaacatggcttaacgcgcggggcgcttctcgattatcacagccgctataaactcgtctttctggcgcattctcagccggagtaccgcaaacttggcccgttcgtggctgatattcaccagtggcaaaatctggatgatttttacaaccagtactaccaacgcgtaattgttttgctttctcatcccgccaacccgcgcgatcacaccaacgttttgatgcacgttcagggttattttcgcccgcatattgattccacagaacgccagcagttggcggcgcttatcgacagttatcgccgtggcgagcaaccacttcttgcgccgctgatgcgtatcaaacactatatggcgctttatcctgacgcctggctttcagggcagcgttatttcgaactttggccgcgtgtgattaacttgcgccattcaggagttttatgattacccatctggtctggtttcgccaggatttacgtctgcacgataatctcgcactggctgccgcctgccgcaattcgtctgcacgcgtgctggcgttatatatcgctacaccacgccagtgggcgacgcataacatgtcgccgcgtcaggctgaacttatcaatgctcaactgaatgggctacaaatagcgcttgcggaaaaaggtattcctttattgttccgtgaagtggatgactttgtcgccagtgtcgaaatagttaaacaggtgtgcgcggaaaacagcgttacccacctgttttataactatcagtatgaagtgaatgagcgggcgcgggatgtggaagttgaaagagcgctgcgtaacgtggtgtgtgaaggatttgatgacagcgtgatcctgccgcctggcgcggtgatgaccggtaatcacgagatgtacaaagtctttacgccttttaagaatgcctggctgaaacggctgcgggaagggatgccggagtgtgtcgctgcgccaaaagttcgtagtagcggatcgatagagcccgcgccatccattacgctgaattatcctcgtcagtctttcgatactgcgcatttcccggtggaagaaaaagcggcgattgcgcaattacgccagttttgccagaacggtgccggagaatatgagcaacaacgagattttccggcagtggaaggcaccagtcgtttgtccgccagcctggcaacgggcgggttatcgcctcgccagtgtttgcatcgcttgttggcggaacagccgcaggcgctggacggtggggccggtagtgtctggcttagtgagctgatctggcgcgagttctaccgtcatctgatgacgtattacccctcgttgtgtaaacattgtccgtttattgcctggacggatcgtgtgcagtggcaaagcaatcccgcacatttacaggcctggcagaaaggcaaaacgggatacccgattgttgatgccgctatgcgtcagcttaacagcactggctggatgcataaccggctacggatgattacagccagttttctggtgaaagatttgttgatcgactggcgcgaaggcgagcgatatttcatgtcgcagctgattgatggtgatttggcagctaataacggtggctggcagtgggcggcttctacgggtactgatgctgcgccgtattttcgtattttcaatccgataactcagggcgagaaatttgatcgcgaaggtgagtttatccgccgatggttaccggagctgcgcgatgtaccagggaaagcggtgcatgagccgtggaagtgggcgcagaaagcaggtgtgaagctggattatccgcaaccgatagttgatcacaaagaggcaaggctgcgaacgctggcagcgtacgaagaagcgaggaaaggagcctgataaaacgcagcgagcgttttatcaggtatggtgctggcctattatgactccagcgccagcgcgcggtttctgaatttcagcgcctgatacagccaaatcatcagtaccagtcctacacacgccagtgcgccccaggtaatttgatcaaatacttcaatatatgcattgatggagtagttgatcgccccggaagcatcaaacgaagcctgcgatgtctgatcggcaatcacgcccgccagatagttcgcgatcgcgccagaaagcagcatgtagatgccggttaatacgccggtcacgcccggaatttcaatgcgcgtaatttgcgacatggcaaccgggtcgataaacagttccgcaaagcccatcaccgccaggcctaataccatcagtggcagagaagagtgaccatacattgcggaccagcgggcgcttaaggtcagaatgcagaatccggcgctcatcaggccaaggccaagagcaaatttcccccagatgcgcacggtacgattacccgcgacgctttctttaaccacccacgccaggaacacaccgcacagcataactgcgaaggcattaatcgactggaacatagcagtcggaacggtataaccaaacatatcgcggttaacgaagcggtcgatataaaggctaatcgagctgccgccctgttgtgcgaaggcccagaacaacatactgaagaaggtgagcgtcacaatcagccccagctccttacgctgtttctggttttctgctttgcgataaatttttgccagtacacccaggccaataatagtcgcgacaattaaggcgtataccgaccactctttccagaacagtacggtaatcagcgcaggcgttgccaccagcagaaccagcagccatccccagttaggcaggagaaagtttgttgcacgcagtacttttttattaacgccgcgggtatgtgtgaaatgacgattgccacataagaaaatgaccagacccgcgatcatacccaccgccgccaggccaaagcccatcgcccagctgtactcttcctgggcgtaaccacaggcgataggtgcgataatagaccccacgttacccgctgcatacatcagcgagaaaccgccatcacgacgcggatcggttggctcatacagctcgccgagcaggcaactgacattggatttaaacagaccatagccacaaacgataatcgccagggacagatagaggaatgacggatggatctcactggcacccagcaccacatgaccgatcgccatcaacaacgcccccagcatcaccgccatgcgattgccgagaactttatccgccaaaaagccaccgaggattggcgtgacatacaccagcgaacagtaggcgctaaataactcgtaggcgtgagtatcgttgtattttagttgattggtgagatagagaatcagcagggcacgcatgccgtaaaagctaaaatattcccagatttgcagcgcaacgacatagtaaatagcgcgcggttgtgatgcgtgtttattcataataattccacaattgacggcaacgtcacgtaatagttgcgcggcgtgcttgtgtttccttaaagttaaaactttgatacagatctgattatttatgcaatatgctgtctgattgcataaatatacattagctgaagcgtgatgatataaacaatttgcgtcttttggcgtcgggtttgtttcttaatatgtcaaaagattggctatcgacgaacaggcgaggtaacgctatgttaacggtgtagctatcagaatacggaaggcgcgaagatgaaaaacaccgaactggaacaactgattaacgaaaaactgaacagcgcggcgattagtgattacgcgccgaatggtttgcaggtggaaggcaaagagacggtgcaaaaaattgttaccggtgtcaccgccagccaggctttgctcgatgaggcagtgcgtctgggcgcggatgcggtcattgtgcatcatggctacttctggaaaggagagtctccggtcattcgcggaatgaagcgtaaccgtttaaaaacgttgctggcgaatgatatcaacctgtatggctggcatttgccgcttgacgcacatcctgagctgggcaataacgcacagctggcggcgttactggggatcacggtcatgggcgaaattgagccgttggtgccgtggggagagctgaccatgcctgtgccgggactggaactagcctcctggattgaagcgcgtctgggacgtaagccgttatggtgtggcgataccggacctgaggtggtccagcgcgtcgcctggtgcacgggcggcgggcaaagttttatcgatagcgccgcgcgttttggcgtggatgcttttattactggcgaagtttctgaacagaccattcattcagccgcgagcaggggttgcatttttatgctgcaggtcaccatgccactgaacgtggtggtattcgcgcattgagcgagtggctgaatgaaaataccgatcttgatgtgacctttattgatattcctaatcctgcataacgaataatcagagggatcgaaagtgcaacgagcgcgttgttatctgataggtgaaacggcggtagtgctggaactggaaccgccggtgacgctggctagccagaaacggatctggcgactggcgcagcgtctggtggatatgccgaatgtggttgaagccattcccggcatgaacaatatcacggtgattttgcgtaatcctgagtcgctggcgctggatgccatagagcgtttgcaacgctggtgggaggagagcgaggccctggaacctgagtctcgctttattgaaattccggtggtttacggtggtgcaggcggaccggatttggcggtggtcgcggcgcattgcgggttgagcgaaaaacaggttgttgaattgcactcctccgtggaatacgtggtctggtttttaggttttcaaccgggcttcccgtatctcgggagtttgccggaacaactacacacgccacggcgcgctgaaccgcgcttactcgttccggcaggttctgtcgggatcggcgggccgcagactggtgtttatccgctggcaacgccgggtggctggcagttgattggtcatacctcactcagcctgtttgatccggcgcgtgacgaacccatcttattacgtccgggagacagcgtgcgctttgtaccgcagaaggagggagtatgctgaagattattcgtgcgggcatgtataccactgtgcaggatggcggtcgtcacggttttcgccagtcgggtatcagccactgcggcgcactggatatgcccgcgctgcgcattgctaacctgctggtgggtaatgacgccaatgcccccgcgctggagatcacgctcggtcagttaacggttgagttcgaaactgatgggtggtttgctctgacaggggccggttgcgaagcgcggctggatgataatgccgtctggaccggctggcgattgccgatgaaagcaggccagcgtttaacgcttaaacgcccgcagcacgggatgcgcagttatctggcggtcgcgggtggtattgatgttccgccggtaatggggtcatgcagcaccgatctcaacgtggggattggcgggctggaaggccgtttactgaaggatggtgaccgactcccgattggcaaatcgaagcgtgattttatggaagcgcagggcgttaaacagctgctgtggggcaaccgcattcgcgccttgccggggccggaatatcatgagttcgatcgcgcctcgcaggatgcattctggcgttcgccctggcagcttagcccgcaaagtaaccgcatgggctatcgcttacaggggcaaattttaaaacgcaccaccgatcgcgaactgttatctcacggtttgttaccgggtgtggtgcaggtgccgcataacgggcagcctattgtgttgatgaacgacgcacagaccaccggtggttacccgcgtattgcctgtatcattgaggctgatatgtaccatctggcgcaaattccactcggtcagccgattcattttgtccagtgttcactggaagaggcactgaaagcgcggcaagatcaacaacgttatttcgaacaattagcgtggcggctacacaatgaaaattgacctgaacgccgatctgggcgaaggctgcgccagcgacgcagagctattaacgctggtttcctctgccaatattgcttgtggatttcatgcaggcgatgcccaaaccatgcaggcttgcgtgcgtgaagcaataaaaaatggtgtcgcgattggcgctcacccgagttttcccgacagggaaaattttggtcgcagcgccatgcagctgccgccagaaaccgtttacgcccagacgctgtatcaaattggcgcgctggcaacgattgcccgtgcgcaaggcggcgtaatgcgtcatgtcaaaccgcacggcatgttgtacaaccaggcggcgaaagaagcacaactggcagacgccatcgccagagcggtatacgcttgcgatccagcattggttctcgttgggctggcaggaagcgagctgattcgtgcaggcaagcaatatggcctgacaacgcgcgaggaagtgtttgccgatcgcggttatcaggctgacggctcgctggtgccgcgaagtcagccaggcgcgttgattgaaaacgaagaacaggcgctggcgcaaacgctagagatggtgcaacacggcagagtcaaaagtatcaccggcgaatgggcaacggtcacggcgcaaacagtctgcctgcatggcgacggcgagcacgcactggcgttcgcccgccgactacgctctacatttgccgaaaaggagattgttgtcgcagcataaccccgattaataaagaatgaaaaaaggatatcaccatgcctgaaggcccggagatccgccgtgcagcggataacctggaggcggcgatcaaaggcaaaccactaactgatgtctggtttgccttcccgcagttaaaaacttatcaatcacaacttatcggtcaacacgttacccatgtggaaacgcgtggtaaggcgttgttaactcatttttccaacgacttaacgctctacagccataatcagctttacggcgtctggcgcgtggttgataccagcgaagagccgcagaccacgcgagtattgcgggtaaaactgcaaacggctgacaaaaccattctgctttatagcgcctcggatattgagatgttgaggccggaacaactgaccacgcatccgtttttacaacgcgttggtcccgatgtgctggatccgaatctgacgccggaggtggtaaaggaacggttattgtcaccgcgctttcgtaaccgtcagtttgcaggattactgctcgatcaggcgtttctggctgggcttggcaattatttgcgggtggagatcctctggcaggttgggttgactggaaatcataaagcgaaagatctcaatgcggcgcaactggatgcactcgcacacgcgttactggagattcctcggttttcttacgctacgcgggggcaggtggatgagaataagcatcatggggcgctgtttcgctttaaggtttttcatcgtgatggcgaactgtgcgaacgctgtggcggcatcattgagaaaaccacgttgtcctcgcgcccgttttactggtgtccaggctgccagcactaggccgaccgcttcggcgcataggttgaaataaaccgcgcaatggctggccccgtcagcaaaatactgaacaggcgcagggtttgcatcgccataataagcgccatatcggcattgctccctgcggcgatgaccgccacggtatcaagcccgccgggactggtggcgaggtaggcagtcataaaatcaatatgcataaaccgggtcagcccccacgccatacccgcacaaatagccagcagagcaaaaatcgacagcaggatttgcggtagcgggcgtagtgcccgcagtaagatttgtttatcgaaaccaagaccaatccgccagccaattgccatatacgccatcgccagcagccattccggtagttcgatggtgatgagctgaccagactggagcactgcgcccgccagcatcgggatgagcatcgtgccggaaggaagacgcagcatgcatcccgccgtaccggcaacgactgcgagcaaaatcgtaagcaggagattaatgctcactggcgggaaccagacgatttgctggttaaccgcttcagcgttatcacccagcatcatgcgggtgaccagaacagcggcccccgcgacgaacagcactcgcagatattgcataaacgccaccaggcgaatatctgcgccgtaatcttgcgccatagcgaccattgccgctgcgccgcctggagaagaaccccaggcaccggtatttccaggcagtgagctatagcgcaccaataaccaacccacgatggcgctggaaagcagcgtcaccagtaaaatagcaagcacgatcggccagttggcggccagcgtggtgagaatcgaaccagtgaggttttgcgcaatcatgcagccaagaatggcctgcgcggcgagaaaagcggagcggggaagttgcagagtaattccgcgcatactgaagatgatcccggcgatcatcggcccaagtaatagcgccgccgggagatgtaccgcgaggaaaccaatagaaaggagaagtgatagcacacataacattccccactgcaaaactggcatccttcgctccctcattattttctctttggtgtatcgatacagcataaagaaagccgggccaggaaaaaataacagcaatcaaggaaaaggggaaaatcagcaattttctgaaagagatgccctttccggctgcaaagggcatcatggcaaatcagttatagttaattttaaaaagcaccactgtatcgaagggcccagcctcgatgggggtacctgcaatggacgaaagttcagccgtataggttttttcgtagaccaacatgtcgctggtgaaatcggcgtattcagcatatttattgaaggtataaggcgaggcgttttcatccagcaaacgtagcttcagaccattaccaatcaacaatgctttatcttcttcaaccaacgtttcttcggtataaaaggaggaactgactttaaatccgtcggtgcattggtcattttgtgattttgtcgtcttaatactgaatgttttcgacattgtgtggcgacgaatatccagcaaattaaatttaccaaaatcaatcacctgtgtttccggtgaaatggaaaaattgacgctgcaatccagcacgcgaatgttttccagaccggtaatatgatatttcaggttttgggcagtaggatcttcgttaacgctaccggcaccgtcaaattgcacgacgatatagtcgctaagcgtactttgataatcatgcggcggcatttctcgtattttgacgtataaccgcatgcgagcgagaaaggtacgcgacatgtgaatattagcgggatcacccgagcaaattttgttctgccatcccatcgcgataatctgctcaggggtaataaatgtcaatgttcttactgtcaatacactggttagtgtcgatgcggctttttccctggttggcgtcataatcaacgccattgtaagttacgccgagttgataatagcgatcctgcacccccgggtaggggtttacccaggcataaacatgctcactttcaaaattgccgttggtattgttgtcacaatagacgggaattttaatatcgtcagattcccaaatcttatcgccgagtttggcattgcctggtacagcaaaaggttgaatcgcttctgatttttctaccgagccaccggatgaaccaaagtagcagttcagggcaagcgcagacttcaacggcagaaataacagacagatgacgagcaacactcccttgccagcactcatttcttcgcctccacggcttgtaaatggcattgtccgctgcagttgagcgtcgtcatgcgtaacgcgccgtaatcatccatataaccgagataaaactggctgccgctataatttccggtgtttgtgttgaccgtactaaaaggcgcaaccatcacggttttgaagccggggagaacgcctttttcatttcgtcccaggtaggcaatggtcagataatacgcggtaggatttttcagtgtcagttggttgccctgctggctgacctgtaactgcagttcgaccttttctcctgctttcttgcgtaatgcagccggtcgccagaacaccttgatacgactctgaatggcgacttgcagaacggcatggtcgctgtttttttccggggcgggaggaatttcacgcatattgtagaaaaatagcgtttcgcgatcgcccggtaattttgtggtcgaggcttgctttactatccgtacctgcgttgttgctttcggttccagacgttgtatcggcggcagggcgaccagaagatcatcgcttttctcccctttttcattttcgagccaggaataagcgaggtaggggagtttatcgctacgattatccacccgcaaactggtagctttatcattagcgttaaacacaatacgagtgcgatcgggttgtagtgcagcgtggctgcacagactggcaaccaacaacaaaaggggtagtcctttcataaatgtcattttcatttccttaattaatgacaaggtaaaatcaggcgatttgcggtgtcttccatatgttcaggaagatggagcgagcaatgctggctatcaccccagaccacggtaaacttttgattttcagcgactccgcttaaccaggcatgtccttcctcgccaaccatccccacgctaatgccgctgtcatcctggcggatatccgctccgaggggaggaaactgaccgctggcgttgcgaatgatgacgttaacgtctttaccggaacgggaagccagtgatttgtaacctatcgcgccttcaatccacgtttctttgataacgttttctgcaactgttacgccgtcgggtaagtcattcatgttcaccgccacggtggaaggctggtaactggaaatcaacggcaccaccgcaatgccaaaatggttggtgtagtcgagattgccctgaatcggaatatctgccacgccatcggtgctgaccatcaggcgtggttcattggtggagctgcggcgatgaaacgctgcaccatattgggttgcggtgaaagaaccgctccagctgctgctgacggaactgtaatcattggcggcataggtaccagaaatatcccactcacccgctgaactcaggtgctgatagttaccgctcacctgggctccattgtcaggacggtcggattgcagtccggcagacatgccccagctattacgttcatccagcgtatcgttccacgacatgcggtgtgtggtgctgtggctactgttttgcatgtcatagccaacccgaccaccgttaccgaaggggagcgaaatcgacaggtaaatctggttgtcgcgatctttatcttcgtaatgggttgtattgaatgacgtcgaaatagagatatctctccagtcaccaatatcaacattaaaacctgccgtgatgttggcggtcgtggaggcgtctgcattccaccaggtttgatgtagcaggttggcgtaaagattgaggtttagtggggtaatcggttggcccacagataagctgatcgtctgtttttcgtcctgcgcatcgctgtcgttgtatttgtgatccagatagttggcgtagctgtgaaaatgacgatcggagaaacgataagcggcgagggaaatcgtgctgttagtggcatccacttgtttgctgtaattaaaacggtagcttaagccccgctcgtcctgctgagtatcaaagtgactactggcccacgtgacatcaaacgacagcgcgccaagccacagcatattttgcccgatacctattgcggcagaatggtagtcatcaccagaaagcagcaggccgccgtacagcgaggtgtttgacagcatcccccaggaaacttcattgctaaaaaaggtttcattttcagtttgatgtgacatggagggccgtggctgacccgcggccagtttatagcgaacctgtccctgacgagtcaggaagggcgtcgatgctgccgaaacctggaaattgttcacccgaccatcttcttccgtcactttgacatccagtgtgccctgaacagactgattaaggtcgtcaatgataaatgggcctggtgggacttttttctggtaaatgacgcggcctgattgactgatcgtcaccgtggcattggtctttgcaataccgctaatttgtggggcgtagccgcgtagttcccatggcaacattcgatcgtcacttgccagtgccgcgccggtataagaaaaaccgtcgaaaatattggaactaaaatccgtttcgccgagggttaattttgaacctaattgcggtaacgggcgaaaaagataggtacgtgatatttcgcctgactgttcatggttatcatcgctatcagtctgattcaactgataatcactgcgtaagcgccatgcccccgtgttgattccggctgttccataggcgttaagattagtgctgctgctgccatcctgtgggcggtagctgctggcaaacaagttgtaatccatcaggacaccggcgacaccttctttccatgtggagggtggggtccagttttctgagtgccacgccagccaggcttgcggaatggtgatatttagttgctgattggcttgatcgaaattgaagagcatttcaggtcgggagctaaaatcgacgcactgatttatcaatggtaacgactgacggacttcaggttttaagccaaatttatcgaccagtaaatcattgatgcacggaatggttttatcgtcatttttgtgccagttaatcttttgcccgttactgatttggttattatttaccgcaacgctaacaaaatactcaccgggagcaatgactcctttttcctttaataatgaaatatcaatgcggtcgcgcattgatttatcgagaacattaaggttgaattcgaccgccaatgcgcaaggcatcgccacgaccaggcaggatacaaaagagagtcgataaatattcacggtgtccatacctgataaatattttatgaaaggcggcgatagcgccgccaaagtaatacttatttataatccagcacgtaggttgcattcgccgtaactgcgcctggcgttacaggtgtagcctgatcaatttgttccatccaggcaaagaaattcagcgtttgttcgctggaggtcggagccaggtcgatatctggagtagcggtgcctaaaacgatattgctttgatctttattcattaaacgtacgccgacgccggtggcttcacccgtgctggtgttgttgagaatcggatctgcgccggtggttttcgctgagctatcaaaggtgactgcaactttagaaatcttgccaccggaaccgttgctggagttttccagatcacagttgactaagcgcaggtcgacagcaacggcatcgctgtgatgtgactgattaatgtggctggtggtcacctgaccgagttcaacctctttatcaatatcatcctgatgtatttcacacggtgcttcaataacttcacctttaaagtgaatttcaccggatccttcatcagccgcataaacaggtgctgtgaacagcagagatacggccagtgcggccaatgttttttgtcctttaaacataacggagtcctttaacagaaaagaaaaaagtatatcggtgcaagaatatcttatttgattgtcgaatgtttttagtttttcttaaaaatattattaattttattaatgtaaaagtaattaattgatggtatgaattaaatgtttgatgaataacgtattggaaattataggggtgcgctatatttggtggtttattcatgtaactgagaggaagatagatgattaaaaatcatcgatttgtttataatttataccgatatattttttttagaatatatgaatgtccgatagtggattttatttttacaattttttgtgtttaggcatataaaaattaacccgccatttgaacggcgggttaaaatatttacaacttagcaatcaaccattaacgcttgatatcgcttttaaagtcgcgtttttcatatcctgtatacagctgacgcggacgggcaatcttcataccgtcactgtgcatttcgctccagtgggcgatccagccaacggtacgtgccattgcgaaaatgacggtgaacatggaagacggaatacccatcgctttcaggatgataccagagtagaaatcgacgttcgggtacagtttcttctcgataaagtacgggtcgttcagcgcgatgttttccagctccatagccacttccagcaggtcatctttggtgcccagctctttcagaacttcatggcaggtttcacgcattacggtggcgcgcgggtcgtaatttttgtacacgcggtgaccgaagcccatcaggcggaaagaatcatttttatctttcgcacgacgaacaaattccggaatgtgtttaacggagctaatttcttccagcattttcagcgccgcttcgttagcaccaccgtgcgcaggtccccacagtgaagcaatacctgctgcgatacaggcaaacgggttcgcacccgaagagccagcggtacgcacggtggaggtagaggcgttctgttcatggtcagcgtgcaggatcagaatacggtccatagcacgttccagaatcggattaacttcatacggttcgcacggcgtggagaacatcatattcaggaagttaccggcataggagagatcgttgcgcggataaacaaatggctgaccaatggaatacttgtaacacatcgcggccatggtcggcattttcgacagcaggcggaacgcggcaatttcacgatgacgaggattgttaacatccagcgagtcgtgatagaacgccgccagcgcgccggtaataccacacatgactgccattggatgtgagtcgcgacggaaagcgtggaacagacgggtaatctgctcgtggatcatggtatgacgggtcaccgtagttttaaattcgtcatactgttcctgagtcggtttttcaccattcagcaggatgtaacaaacttccaggtagttagaatcggtcgccagctgatcgatcgggaaaccgcggtgcagcaaaataccttcatcaccatcaataaaagtaattttagattcgcaggatgcggttgaagtgaagcctgggtcaaaggtgaacacaccttttgaaccgagagtacggatatcaataacatcttgacccagcgtgcctttcagcacatccagttcaacagctgtgtccccgttgagggtgagttttgcttttgtatcagccatttaaggtctccttagcgccttattacgtaagactgccggaacttaaatttgccttcgcacatcaacctggctttacccgtttgttatttggctcgccgctctgtgaaagaggggaaaacctgggtacagagctctgggcgcttgcaggtaaaggatccattgatgacgaataaatggcgaatcaagtacttagcaatccgaattattaaacttgtctaccactaataactgtcccgaatgaattggtcaatacttccacactgttacataagttaatcttaggtgaaataccgacttcataacttttacgcattatatgcttttcctggtaatgtttgtaacaactttgttgaatgattgtcaaattagatgattaaaaattaaataaatgttgttatcgtgacctggatcactgttcaggataaaacccgacaaactatatgtaggttaattgtaatgattttgtgaacagcctatactgccgccaggtctccggaacaccctgcaatcccgagccacccagcgttgtaacgtgtcgttttcgcatctggaagcagtgttttgcatgacgcgcagttatagaaaggacgctgtctgacccgcaagcagaccggaggaaggaaatcccgacgtctccaggtaacagaaagttaacctctgtgcccgtagtccccagggaataataagaacagcatgtgggcgttattcatgataagaaatgtgaaaaaacaaagacctgttaatctggacctacagaccatccggttccccatcacggcgatagcgtccattctccatcgcgtttccggtgtgatcacctttgttgcagtgggcatcctgctgtggcttctgggtaccagcctctcttcccctgaaggtttcgagcaagcttccgcgattatgggcagcttcttcgtcaaatttatcatgtggggcatccttaccgctctggcgtatcacgtcgtcgtaggtattcgccacatgatgatggattttggctatctggaagaaacattcgaagcgggtaaacgctccgccaaaatctcctttgttattactgtcgtgctttcacttctcgcaggagtcctcgtatggtaagcaacgcctccgcattaggacgcaatggcgtacatgatttcatcctcgttcgcgctaccgctatcgtcctgacgctctacatcatttatatggtcgtttttttcgccaccagtggcgaactgacatatgaagtctggatcggtttcttcgcctctgcgttcaccaaagtgttcaccctgctggcgctgttttctatcttgattcatgcctggatcggcatgtggcaggtgttgaccgactacgttaaaccgctggcattgcgcctgatgctgcaactggtgattgtcgttgcactggtggtttacgtgatttatggattcgttgtggtgtggggtgtgtgatgaaattgccagtcagagaatttgatgcagttgtgattggtgccggtggcgcaggtatgcgcgcggcgctgcaaatttcccagagcggccagacctgtgcgctgctctctaaagtcttcccgacccgttcccataccgtttctgcgcaaggcggcattaccgttgcgctgggtaatacccatgaagataactgggaatggcatatgtacgacaccgtaaaagggtcggactatatcggtgaccaggacgcgattgaatatatgtgtaaaaccgggccggaagcgattctggaactcgaacacatgggcctgccgttctcgcgtcttgatgatggtcgtatctatcaacgtccgtttggcggtcagtcgaaaaacttcggcggcgagcaggcggcacgcactgcggcggcggctgaccgtaccggtcacgcactgttgcacacgctttatcagcagaacctgaaaaaccacaccaccattttctccgagtggtatgcgctggatctggtgaaaaaccaggatggcgcggtggtgggttgtaccgcactgtgcatcgaaaccggtgaagtggtttatttcaaagcccgcgctaccgtgctggcgactggcggggcagggcgtatttatcagtccaccactaacgcccacattaacactggcgacggcgtcggcatggctatccgcgcaggcgtaccggtgcaggatatggaaatgtggcagttccacccgaccggtattgccggtgcgggcgtactggtcaccgaaggttgccgtggtgaaggcggttatctgctgaacaaacatggcgaacgctttatggagcgttatgcgccgaacgccaaagacctggcgggccgtgacgtggtggcgcgttccatcatgattgaaatccgtgaaggtcgcggctgtgatggtccgtgggggccacatgcgaaactgaaactcgaccacctgggtaaagaagttctcgaatcccgtctgccgggtattctggaactctcccgtaccttcgctcacgttgatccggtgaaagagccgattccggttatcccaacctgtcactacatgatgggtggtattccgaccaaagtgaccggtcaggcgctgacggtgaacgagaaaggcgaagatgtggttgttccggggctgtttgccgttggtgaaatcgcttgtgtatcggtacacggcgctaaccgtctgggcggcaactcgctgctggacctggtggtctttggtcgcgcagcgggtctgcatctgcaagagtctatcgccgagcagggcgcattgcgcgatgccagcgagtctgatgttgaagcatctctggatcgtctgaaccgctggaacaataatcgtaacggtgaagatccggtggcgattcgtaaagcgctgcaagaatgtatgcagcataacttctcggtcttccgtgaaggtgatgcgatggcgaaagggcttgagcagttgaaagttatccgcgagcgtctgaaaaatgcccgtctggatgacacttccagcgagttcaacacccagcgcgttgagtgcctggaactggataacctgatggaaacggcgtatgcaacggctgtttctgccaacttccgtaccgaaagccgtggcgcgcatagccgcttcgacttcccggatcgtgatgatgaaaactggctgtgccactccctgtatctgccagagtcggaatccatgacgcgccgaagcgtcaacatggaaccgaaactgcgcccggcattcccgccgaagattcgtacttactaatgcggagacaggaaaatgagactcgagttttcaatttatcgctataacccggatgttgatgatgctccgcgtatgcaggattacaccctggaagcggaagaaggtcgcgacatgatgttgctggatgcgcttatccagctgaaagagaaagatcccagcctgtcgttccgccgctcctgccgtgaaggtgtgtgcggttccgacggtctgaacatgaacggcaagaatggtctggcctgtattaccccgatttcggcactcaaccagccgggcaagaagattgtgattcgcccgctgccaggtttaccggtgatccgcgatttggtggtagacatgggacaattctatgcgcaatatgagaaaattaagccttacctgttgaataatggacaaaatccgccagctcgcgagcatttacagatgccagagcagcgcgaaaaactcgacgggctgtatgaatgtattctctgcgcatgttgttcaacctcttgtccgtctttctggtggaatcccgataagtttatcggcccggcaggcttgttagcggcatatcgtttcctgatcgatagccgtgataccgagactgacagccgcctcgacggtttgagcgatgcattcagtgtattccgctgtcacagcatcatgaactgcgtcagtgtatgtccgaaggggctgaacccgacgcgcgccatcggccatatcaagtcgatgttgttgcaacgtaatgcgtaattaaatgttgatgccggggaaatcccccggctattcaggaaatctttaaaaactgcccctgacactaagacagtttttaaaggttccttcgcgagccactacgtagacaagagctcgcaagtgaaccccggcacgcacataactgtgcgtggtagtatccacggcgaagtaagcataaaaaagatgcttaagggatcacgatgcagaacagcgctttgaaagcctggttggactcttcttacctctctggcgcaaaccagagctggatagaacagctctatgaagacttcttaaccgatcctgactcggttgacgctaactggcgttcgacgttccagcagttacctggtacgggagtcaaaccggatcaattccactctcaaacgcgtgaatatttccgccgcctggcgaaagacgcttcacgttactcttcaacgatctccgaccctgacaccaatgtaaagcaggttaaagtcctgcagctcattaacgcataccgcttccgtggtcaccagcatgcgaatctcgatccgctgggactgtggcagcaagataaagtggccgatctggatccgtctttccacgatctgaccgaagcagacttccaggagaccttcaacgtcggttcatttgccagcggcaaagaaaccatgaaactcggcgagctgctggaagccctcaagcaaacctactgcggcccgattggtgccgagtatatgcacattaccagcaccgaagaaaaacgctggatccaacagcgtatcgagtctggtcgcgcgactttcaatagcgaagagaaaaaacgcttcttaagcgaactgaccgccgctgaaggccttgaacgttacctcggcgcaaaattccctggcgcaaaacgcttctcgctggaaggcggtgacgcgttaatcccgatgcttaaagagatgatccgccacgctggcaacagcggcacccgggaagtggttctcgggatggcgcaccgtggtcgtctgaacgtgttggtgaacgtgctgggtaaaaaaccgcaagacttgttcgacgagtttgccggtaaacataaagaacacctcggcacgggtgacgtgaaataccacatgggcttctcgtctgacttccagaccgatggcggcctggtgcacctggcgctggcgtttaacccgtctcaccttgagattgtaagcccggtcgttatcggctctgttcgtgcccgtctggacagacttgatgagccgagcagcaacaaagtgctgccaattaccatccacggtgacgccgcagtgaccggacagggcgtggttcaggaaaccctgaacatgtcgaaagcgcgtggttatgaagttggcggtacggtacgtatcgttatcaacaaccaggttggtttcaccacctctaatccgctggatgcccgttctacgccgtactgtactgatatcggcaagatggttcaggcaccgattttccacgttaacgcggacgatccggaagccgttgcctttgtgacccgtctggcgctcgatttccgtaacacctttaaacgtgatgtcttcatcgacctggtatgctaccgccgtcacggccacaacgaagccgacgagccgagcgcaacccagccgctgatgtatcagaaaatcaaaaaacatccgacaccgcgcaaaatctacgctgacaagctggagcaggaaaaagtggcgacgctggaagatgccaccgagatggttaacctgtaccgcgatgcgctggatgctggcgattgcgtggtagcagagtggcgtccgatgaacatgcactctttcacctggtcgccgtacctcaaccacgaatgggacgaagagtacccgaacaaagttgagatgaagcgcctgcaggaactggctaaacgcatcagcacggtgccggaagcggttgaaatgcagtctcgcgttgccaagatttatggcgatcgccaggcgatggctgccggtgagaaactgttcgactggggcggcgcggaaaacctcgcttacgccacgctggttgacgaaggcattccggttcgcctgtcgggtgaagactccggtcgcggtaccttcttccaccgccacgcggtgatccacaaccagtctaacggttccacttacacgccgctgcaacacatccataacggccagggcgcgttccgtgtttgggactccgtactgtctgaagaagcagtgctggcgtttgaatacggttatgccaccgcagaaccacgcaccctgaccatctgggaagcgcagttcggtgacttcgccaacggtgcgcaggtggttatcgaccagttcatctcctctggcgagcagaaatggggccggatgtgtggtctggtgatgttgctgccgcacggttacgaagggcaggggccggagcactcctccgcgcgtctggaacgttatctgcaactttgtgctgagcaaaacatgcaggtttgcgtaccgtctaccccggcacaggtttaccacatgctgcgtcgtcaggcgctgcgcgggatgcgtcgtccgctggtcgtgatgtcgccgaaatccctgctgcgtcatccgctggcggtttccagcctcgaagaactggcgaacggcaccttcctgccagccatcggtgaaatcgacgagcttgatccgaagggtgtgaagcgcgtagtgatgtgttctggtaaggtttattacgacctgctggaacaacgtcgtaagaacaatcaacacgatgtcgccattgtgcgtatcgagcaactctacccgttcccgcataaagcgatgcaggaagtgttgcagcagtttgctcacgtcaaggattttgtctggtgccaggaagagccgctcaaccagggcgcatggtactgcagccagcatcatttccgtgaagtgattccgtttggggcttctctgcgttatgcaggccgcccggcctccgcctctccggcggtagggtatatgtccgttcaccagaaacagcaacaagatctggttaatgacgcgctgaacgtcgaataaataaaggatacacaatgagtagcgtagatattctggtccctgacctgcctgaatccgtagccgatgccaccgtcgcaacctggcataaaaaacccggcgacgcagtcgtacgtgatgaagtgctggtagaaatcgaaactgacaaagtggtactggaagtaccggcatcagcagacggcattctggatgcggttctggaagatgaaggtacaacggtaacgtctcgtcagatccttggtcgcctgcgtgaaggcaacagcgccggtaaagaaaccagcgccaaatctgaagagaaagcgtccactccggcgcagcgccagcaggcgtctctggaagagcaaaacaacgatgcgttaagcccggcgatccgtcgcctgctggctgaacacaatctcgacgccagcgccattaaaggcaccggtgtgggtggtcgtctgactcgtgaagatgtggaaaaacatctggcgaaagccccggcgaaagagtctgctccggcagcggctgatccggcggcgcaaccggctctggctgcacgtagtgaaaaacgtgtcccgatgactcgcctgcgtaagcgtgtggcagagcgtctgctggaagcgaaaaactccaccgccatgctgaccacgttcaacgaagtcaacatgaagccgattatggatctgcgtaagcagtacggtgaagcgtttgaaaaacgccacggcatccgtctgggctttatgtccttctacgtgaaagcggtggttgaagccctgaaacgttacccggaagtgaacgcgtctatcgacggcgatgacgtggtttaccacaactatttcgacgtcagcatggcggtttctacgccgcgcggcctggtgacaccggtactgcgtgatgtcgataccctcggcatggcagacatcgagaagaaaatcaaagagctggcagtcaaaggccgtgacggcaagctgaccgttgaagatctgaccggtggtaacttcaccatcaccaacggtggtgtgttcggttccctgatgtctacgccgatcatcaacccgccgcagagcgcaattctgggtatgcacgctatcaaagatcgtccgatggcggtgaatggtcaggttgagatcctgccgatgatgtacctggcgctgtcctacgatcaccgtctgatcgatggtcgcgaatccgtgggcttcctggtaacgatcaaagagttgctggaagatccgacgcgtctgctgctggacgtgtagtagtttaagcttcacctgcactgtagaccgacgtggatagggtgtcggtctacggtttaaaagataacgattactgaaggatggacagaacacatgaacttacatgaatatcaggcaaaacaactttttgcccgctatggcttaccagcaccggtgggttatgcctgtactactccgcgcgaagcagaagaagccgcttcaaaaatcggtgccggcccgtgggtagtgaaatgtcaggttcacgctggtggccgcggtaaagcgggcggtgtgaaagttgtaaacagcaaagaagacatccgtgcttttgcagaaaactggctcggcaagcgtctggtaacgtatcaaacagatgccaatggccaaccggttaaccagattctggttgaagcagcgaccgatatcgctaaagagctgtatctcggtgccgttgtagaccgtagttcccgtcgtgtggtctttatggcctccaccgaaggcggcgtggaaatcgaaaaagtggcggaagaaactccgcacctgatccacaaagttgcgcttgatccgctgactggcccgatgccgtatcagggacgcgagctggcgttcaaactgggtctggaaggtaaactggttcagcagttcaccaaaatcttcatgggcctggcgaccattttcctggagcgcgacctggcgttgatcgaaatcaacccgctggtcatcaccaaacagggcgatctgatttgcctcgacggcaaactgggcgctgacggcaacgcactgttccgccagcctgatctgcgcgaaatgcgtgaccagtcgcaggaagatccgcgtgaagcacaggctgcacagtgggaactgaactacgttgcgctggacggtaacatcggttgtatggttaacggcgcaggtctggcgatgggtacgatggacatcgttaaactgcacggcggcgaaccggctaacttccttgacgttggcggcggcgcaaccaaagaacgtgtaaccgaagcgttcaaaatcatcctctctgacgacaaagtgaaagccgttctggttaacatcttcggcggtatcgttcgttgcgacctgatcgctgacggtatcatcggcgcggtagcagaagtgggtgttaacgtaccggtcgtggtacgtctggaaggtaacaacgccgaactcggcgcgaagaaactggctgacagcggcctgaatattattgcagcaaaaggtctgacggatgcagctcagcaggttgttgccgcagtggaggggaaataatgtccattttaattgataaaaacaccaaggttatctgccagggctttactggtagccaggggactttccactcagaacaggccattgcatacggcactaaaatggttggcggcgtaaccccaggtaaaggcggtactacccacctcggcctgccggtgttcaacaccgtgcgtgaagctgttgctgctactggcgctaccgcttctgttatctacgtaccagcaccgttctgcaaagactccattctggaagctattgatgcaggcatcaaactgattatcaccatcactgaaggcatcccgacgctggatatgctgactgtgaaagtgaaactggacgaagccggcgttcgtatgatcggcccgaactgcccgggcgttatcactccgggtgaatgcaaaatcggtatccagccgggtcacattcacaaaccgggtaaagtgggtatcgtttcccgttccggtacactgacctatgaagcggttaaacagaccacggattacggtttcggtcagtcgacctgtgttggtatcggcggtgacccgatccctggctctaactttatcgacattctcgaaatgttcgaaaaagatccgcagaccgaagcgatcgtaatgatcggtgagatcggcggtagcgctgaagaagaagcggcagcgtacatcaaagagcatgttaccaagccagttgtgggttacatcgctggtgtgactgcgccgaaaggcaaacgtatgggccacgcgggtgccatcattgccggtgggaaagggactgcggatgagaaattcgctgctctggaagccgcaggcgtgaaaaccgttcgcagcctggcggatatcggtgaagcactgaaaactgttctgaaataaatatctgtaataagaaatagccctcgccgcttccctctacaggaatggcgaagggctgtcggtttcgacatggttggccatcgtatgatggccttttttgtgcttatcgcgatgattttcgttgcgctatcagggtaaatttatagtcatcggtattaaaagcgttgcggctatattcaaacacccgaccatcaactaaatatccacgcgatactttttcaagaatcggctttgtctggctgatattaagcagacggctcatctcttcggttggcatcagaggaatgatttcctgttcgctacgatcgataaccattttcttcacttcttcaataaagtgatattttgaattttccatgacctgccaggtgagatccgggaacaacgcaagcggcatccaggtttcttccagcgccattggcttttgcttgcgatagcgcacgcgcttcacatgccacacacgatcctgcgcggtgatttgtagctgttgctgaagaaaatcgtcagccggaatcacttcaaatatcaggacttcactgtgtgtatcgacgtgacggtccgacagtttttcatcaaaactggttaactgaaaaatatcgtaattgacccgctcttctttgacgtaagtcccgctgccctgaatgctttcgaggatctgttgctcgactaactggcgcaaagcctgacgcaccgtaacccggctgacgccaaactctgtttgtaatgccgattcggtaggtaacgcatcgccaggtttaagctcgccacgcgcaatttgttcacgaatgcgatcggcaatctgccggtataagggcttgtgtcccatttttagtatctcattaatacgaatttagccattatgcccgataaattcatcctgtaaataatacaaatacaatacaaataatttcaatcaagtgaaattgatcacataatggtattgttttatcgggcacactggcgcgactataaaaacgatcaagtgaggatcatgatgaatctgacgactctgacccaccgcgatgcgttgtgtctgaatgcgcgctttaccagccgtgaagaggccatccacgcgttgactcaacgtcttgctgctctggggaaaatttccagtactgagcaatttctggaagaagtgtatcgccgtgaaagccttggcccgaccgccttaggtgaagggttggctgtgccgcatggcaaaactgctgcggtaaaagaagcggcgtttgcggtcgccacactcagcgagccgcttcagtgggaaggcgttgatggcccggaagcggttgatttagtggtgctgctggcgattccccccaatgaagcgggtactacgcatatgcaactgctgacagcgctgaccacgcgcctggcggatgatgagattcgggcgcgtatacagtcggcgacgacgcctgatgagttgctctcggcgctggatgacaagggagacacgcaaccttctgcctctttttccaacgcgccaactatcgtctgcgtaacggcctgtccggcgggtattgctcacacctatatggctgcggaatatctggaaaaagccggacgcaaactcggcgtaaatgtttacgttgaaaaacaaggcgctaacggcattgaagggcgtttaacggcggatcaactcaatagtgcaaccgcctgtatttttgcggctgaagtcgccatcaaggagagtgagcgttttaatggcattcccgcgctttcagtgcgtgttgccgagccgattcgccatgcagaagcgttgatgcaacaagcgcttaccctcaagcgtagcgatgagacgcgtaccgtacagcaagatacgcaaccggtgaaaagtgtcaaaacggagctgaaacaggcactgttgagcggaatctcttttgccgtaccgttgattgtcgcggggggcacggtgctggcggtcgcggtattactgtcgcaaatcttcgggctacaagatctgtttaatgaagaaaactcctggctgtggatgtaccgcaagctgggcggcgggctgctcggaattttgatggtaccggtgctcgcggcctataccgcctattctctggcagataaaccggcgttagcgccaggctttgcggctggacttgccgccaacatgatcggctccgggtttctcggcgcggtcgttggcggattgatagccggttacttgatgcgctgggtgaaaaatcacttgcgtcttagcagtaaattcaatggattcctgactttttatctctacccggtgctcggtacgttgggagcgggcagtctgatgctgtttgtggtgggagaacctgtcgcctggatcaataactcgcttaccgcctggctgaacggtctgtcaggaagtaacgcgctgttgctgggtgccattctcggttttatgtgttcctttgaccttggagggccagtgaacaaagccgcttatgcattctgcctgggcgcaatggcgaacggcgtttacggcccgtatgccattttcgcctccgtcaaaatggtttcggcatttaccgtaaccgcttccacgatgctcgcaccgcgcctgtttaaagagtttgaaattgagaccgggaaatccacctggctgttagggctggcaggtattaccgaaggggcgatcccgatggcgattgaagatccgctgcgggttattggttcgtttgtgctgggctctatggtaacgggcgctattgtcggtgcgatgaatatcggcctttcgacacccggtgccggcattttctcgctctttttacttcatgataatggcgcgggcggtgttatggcggcaattggctggtttggtgcggcattggtgggggctgcaatctcgactgcaattctcctgatctggcggcgtcacgcggttaagcatggcaactatctgactgatggcgtaatgccataaacaaaaaggaaacgacgatgaaagcggtatctcgcgttcacatcaccccgcatatgcattgggatcgggagtggtatttcaccaccgaagagtcacgcattctgctggtcaataatatggaagagatcctgtgccgactggaacaggacaacgaatacaaatattacgtactcgacgggcaaacggcgatcctcgaagattatttcgcggtgaaaccggaaaacaaagaccgcgtgaagaaacaggtagaagccggtaagttgattatcggcccctggtatacccagaccgataccacgattgtttctgcggaatccatcgtccgtaatctgatgtacggaatgcgtgactgcctcgcgtttggcgagccgatgaaaataggttatttaccggattcctttggcatgtccgggcaactgccgcatatctacaatggatttggcattacccgcactatgttctggcgcggatgttcggagcgccacggtactgataaaaccgagtttttatggcaaagcagtgacggtagcgaagtgacggcgcaggtgctgccgttgggttatgccatcggtaagtacttacctgccgacgaaaacggattacgcaaacgcctcgacagttattttgacgtgctggaaaaagcgtctgtaaccaaagagattttattgccgaatggtcatgaccagatgccattgcagcaaaatatcttcgaagtgatggagaaacttcgcgaaatttatcctcaacgaaagtttgtgatgagccgctttgaagaggtattcgagcagatcgaagcgcagcgtgaaagtctggccaccctgaaaggtgaatttatcgatggcaaatatatgcgcgtacatcgcaccatcggttccacgcgcatggatatcaaaattgcccacgcacgtattgaaaataagattgttaatctgctggaaccgctggcaacgctggcctggacgttgggttttgaataccaccacggcttgctggagaaaatgtggaaagagatcttaaaaaatcatgcccacgacagtatcggttgttgttgcagtgacaaagttcatcgcgaaattgtcgcccgcttcgaactggctgaagacatggcggataatctgctgcgtttctacatgcgcaaaattgccgataacatgccacagagtgatgccgacaaactcgtgctgtttaacctgatgccctggccgcgggaagaagttattaacaccactgtgcggctgcgcgccagccagtttaatctacgagacgatcgcggtcagcctgtaccgtattttattcgccatgcccgtgagatcgatccaggcctaatcgatcggcaaatagttcattacggtaattacgatccctttatggagtttgatatacagatcaaccagattgtcccttctatgggctatcgcacgctttatatcgaagcgaatcagcctggcaacgtgattgcggcaaaaagtgacgctgaagggatactggaaaatgctttctggcaaattgcgctcaatgaggatggaacgctacaactggtagataaagatagcggtgtgcgctatgaccgggtgttgcaaattgaagaaagctctgatgatggtgatgaatatgactattcacccgcaaaagaagagtgggtaatgacttctgcaacagcgaaaccgcaatgcgagattactcatgaggcctggcagagcagggctgttatccgctatgacatggcggtgccgctcaatttgttggaacgaagcgtccggcaatccacgggcagagtaggggtggagatggttgtcactctgagtcataacagcagacgtattgatgtggatatcaaccttgataaccaggctgacgatcatcgccttcgcgtcctgatccctacatcttttaacaccgatagtgttctggcagatacccagtttggttcgctaacgcgccccgtgaacgacagtgcaatgaacaactggcagcaagaaggctggaaagaagcgccggttccggtatggaatatgctcaactatgcagccttacaggaagggcgtaacggcatggctgtctttagcgaagggctacgtgaatttgaagtcatcggtgaagagaagaaaacctttgccattacgttgctgcgtggcgtgggcttactgggcaaagaagatctgtttttaaggcctgggcggccttcgggaattaaaatgccagtcccggactcacaactacgtggtctgctttcttgtcgcctaagtttattgagttataccggtacgccaaccgccgctggtgtagctcagcaggcgcgagcatggctgactccagtacagtgttacaacaaaatcccatgggatgcgatgaagctcaacaaagccggattcaacgtgccggaaagttatagtttgttgaaaatgcccccagtgggatgcctgataagcgcacttaagaaagctgaagaccgacaagaagtgattttacggctgtttaatccggctgaatcagcaacctgtgatgcgactgttgctttcagtcgcgaggtgatttcttgctcagaaacgatgatggatgaacacattaccaccgaggaaaatcaaggttcaaatctatcggggccttttttacccggccagtcacggacgttcagttaccggcttgcctgaatagcaatcaaaccgaagccacatatgcgcggccagattgttgacaaagggcgctttgttcatgccggatacggcatgaacgctttattcggtctacaaaagcaggcaaattcaatatattgcagagatgatgtagacactggcaagcgtagcgcatcaggtaattttgcgtttatcttcactctcaagccacgtatatgtggctttatttttaacaaaataataaccctgggtgagttaattataatataattataagttaattaaatgttaatatcagcggggtggatttatgcctttattagtaaccctgaaactctgcgtcgtattagccagtgaccaaaaaagaattaaggtcaaccgtgctgtttttgcttcgtctctttttatctttaattgccaaccgaaactaatttcagccttataactcacacattttaaacataaatgtcactaaagttaccttattgaaacatgattaacataatttgtaggaattgatatttatcaatgtataagtcttggaaatgggcatcaaaaagagataaattgttctcgatcaaattggctgaaaggcggtaatttagctataaattgatcaccgtcgaaaatgcaaatttgcttcaacaaaaacctgtttattgtaaggattttgcggcgtaatatatacgtgggatcaatttgagtttttattaacatgtttgcaacctttctttacgccgtttttgtgtgcattcacatggtatgatgaaagtgttcaaacaaatttctattggggcatgcgtgtgaccctttctaacggggttcactctcggagtcttcatgcgatgagcaaggagtcatgatgttagatatagtcgaactgtcgcgcttacagtttgccttgaccgcgatgtaccacttcctttttgtgccactgacgctcggtatggcgttcctgctggccattatggaaacggtctacgtcctctccggcaaacagatttataaagatatgaccaagttctggggcaagttgtttggtatcaacttcgctctgggtgtggctaccggtctgaccatggagttccagttcgggactaactggtcttactattcccactatgtaggggatatcttcggtgcgccgctggcaatcgaaggtctgatggccttcttcctcgaatccacctttgtaggtctgttcttcttcggttgggatcgtctgggtaaagttcagcatatgtgtgtcacctggctggtggcgctcggttcaaacctgtccgcactgtggattctggttgcgaacggctggatgcaaaacccaatcgcgtccgatttcaactttgaaactatgcgtatggagatggtgagcttctccgagctggtgcttaacccggttgctcaggtgaaattcgttcacactgtagcgtctggttatgtgactggcgcgatgttcatcctcggtatcagcgcatggtatatgctgaaaggtcgtgacttcgccttcgctaaacgctcctttgctatcgctgccagcttcggtatggctgctgttctgtctgttattgttctgggtgatgaatccggctacgaaatgggcgacgtgcagaaaaccaaactggctgctattgaagccgagtgggaaacgcaacctgcgcctgctgcctttactctgttcggcattcctgatcaggaagaggagacgaacaaatttgcgattcagatcccttacgcactgggcatcattgcaacgcgttccgtggataccccggttatcggcctgaaagagctgatggtgcagcatgaagaacgcattcgtaacgggatgaaggcgtactctctgctcgaacaactgcgttctggttctaccgaccaggcggttcgtgaccagttcaatagcatgaagaaagacctcggttacggtctgctgctgaaacgctatacgccaaacgtggctgatgcgactgaagcgcagattcaacaggcaaccaaagactccatcccgcgtgtagcgccgctgtactttgcgttccgtatcatggtggcgtgtggcttcctgctgctggcaatcatcgcgctctctttctggagtgtcatccgcaaccgcattggcgagaaaaaatggcttctgcgcgccgcgctgtacggtattccgctgccgtggattgctgtagaagcgggctggttcgtggctgaatatggccgccaaccgtgggctatcggtgaagtgctgccgacagctgtggcgaactcgtcactgaccgcaggcgatctcatcttctcaatggtgctgatttgcggcctgtataccctgttcctggtggcagaattgttcttaatgttcaaatttgcacgcctcggcccaagcagcctgaaaaccggtcgctatcactttgagcagtcttccacgactactcagccggcacgctaagacaggagtcgtcaaatgatcgattatgaagtattgcgttttatctggtggctgctggttggcgttctgctgattggttttgcagtcactgacggtttcgacatgggggtgggcatgctcacccgtttcctcggtcgtaacgacaccgagcgtcgaattatgattaactccattgcaccacactgggacggtaaccaggtttggctgatcaccgcgggcggcgcactctttgctgcctggccgatggtctatgccgctgcgttctccggcttctatgtggcgatgatcctcgtgctggcgtctttgttcttccgtccggtcggttttgactaccgctccaagattgaagaaacccgctggcgtaacatgtgggactggggcatcttcattggtagcttcgttccgccgctggtaattggtgtagcgttcggtaacctgttgcagggcgtaccgttcaacgttgatgaatatctgcgtctgtactacaccggtaacttcttccagttgcttaacccgttcggcctgctggcaggcgtggtgagcgtagggatgatcattactcagggcgcaacctatctgcaaatgcgtaccgtgggcgaactgcacctgcgtacccgtgcaacggctcaggtggctgcgctggtgacactggtctgtttcgcactggctggcgtatgggtgatgtacggtatcgatggttatgtcgtgaaatcgacaatggaccattacgcagcctctaacccactgaataaagaagtggttcgtgaagctggcgcatggctggttaacttcaacaacacgccaattctgtgggctattccggcgctgggtgtggttctgccgctgctgaccatcctgactgcacgtatggataaagccgcgtgggcgtttgtgttctcctccctgacgctggcctgcatcatcctgacagccggtatcgcaatgttcccgtttgtgatgccgtccagcaccatgatgaacgcaagtctgacaatgtgggatgcaacttccagccagctgacgcttaacgtcatgacctgggttgcggtggttctggtaccgatcattctgctctacaccgcctggtgttactggaaaatgttcggtcgtatcaccaaagaagatattgaacgtaacacccactctctgtactaagtaaggagctaaaaatgtggtatttcgcatggattctgggaacgcttcttgcctgttcgtttggggtaatcaccgcgctggcgcttgaacacgtcgaatcaggcaaagccggtcaagaagacatctgatgagtaagattatcgcgactttgtatgcggtaatggacaagcgccccctgcgggcgctttccttcgtgatggcgcttctgttagcaggatgtatgttttgggacccatctcgttttgccgcgaagaccagtgaactggaaatctggcatggtttattgctgatgtgggccgtctgtgctggtgtgattcacggcgtgggctttcgtccgcagaaggttctttggcaagggattttttgcccattgcttgccgatattgttctcattgtcgggctgattttcttcttcttttaaatcagaattctctttaaaaaattatgggccgctccaggcccataaatttttacgctcccttaacttgccctcattcccaaacctcaatcgcgcgcgtatagtagcagcgtttaaaagctctaacttttgttgcattaccgggatgtaaagtgaatacaacgctgtttcgatggccggttcgcgtctactatgaagataccgatgccggtggtgtggtgtaccacgccagttacgtcgctttttatgaaagagcacgcacagagatgctgcgtcatcatcacttcagtcagcaggcgctgatggctgaacgcgttgcctttgtggtacgtaaaatgacggtggaatattacgcacctgcgcggctcgacgatatgctcgaaatacagactgaaataacatcaatgcgtggcacctctttggttttcacgcaacgtattgtcaacgccgagaatactttgctgaatgaagcagaggttctggttgtttgcgttgacccactcaaaatgaagcctcgtgcgcttcccaagtctattgtcgcggagtttaagcagtgactgacatgaatatccttgatttgttcctgaaggctagccttctggttaaacttatcatgttgattttgattggtttttcaatcgcatcttgggccattattatccagcggacccgtattcttaacgcagcggcgcgcgaagccgaagcgtttgaagataaattctggtctggaatcgaactctctcgcctctatcaagagagccaggggaaacgggataatctgactggttcggaacaaatcttttacagcgggttcaaagagtttgtgcgcctgcatcgtgccaatagccatgcgccggaagccgtagtggaaggggcgtcgcgtgctatgcgtatctccatgaaccgtgaacttgaaaatctggaaacgcacattccgttcctcggtacggttggctccatcagcccgtatattggtctgtttggtacggtctgggggatcatgcacgcctttatcgccctcggggcggtaaaacaagcaacactgcaaatggttgcgcccggtatcgcagaagcgttgattgcgactgcaattggtctgttcgccgcaattccggcggtaatggcttataaccgcctcaaccagcgcgtaaacaaactggaactgaattacgacaactttatggaagagtttaccgcgattctgcaccgccaggcgtttaccgttagcgagagcaacaaggggtaagccatggccagagcgcgtggacgaggtcgtcgcgatctcaagtccgaaatcaacattgtaccgttgctggacgtactgctggtgctgttgctgatctttatggcgacagcgcccatcatcacccagagcgtggaggtcgatctgccagacgctactgaatcacaggcggtgagcagtaacgataatccgccagtgattgttgaagtgtctggtattggtcagtacaccgtggtggttgagaaagatcgcctggagcgtttaccaccagagcaggtggtggcggaagtgtccagccgtttcaaggccaacccgaaaacggtctttctgatcggtggcgcaaaagatgtgccttacgatgaaataattaaagcactgaacttgttacatagtgcgggtgtgaaatcggttggtttaatgacgcagcctatctaaacatctgcgtttcccttgcttgaaagagagcgggtaacaggcgaacagtttttggaaaccgagagtgtcaaaggcaaccgaacaaaacgacaagctcaagcgggcgataattatttcagcagtgctgcatgtcatcttatttgcggcgctgatctggagttcgttcgatgagaatatagaagcttcagccggaggcggcggtggttcgtccatcgacgctgtcatggttgattcaggtgcggtagttgagcagtacaaacgcatgcaaagccaggaatcaagcgcgaagcgttctgatgaacagcgcaagatgaaggaacagcaggctgctgaagaactgcgtgagaaacaagcggctgaacaggaacgcctgaagcaacttgagaaagagcggttagcggctcaggagcagaaaaagcaggctgaagaagccgcaaaacaggccgagttaaagcagaagcaagctgaagaggcggcagcgaaagcggcggcagatgctaaagcgaaggccgaagcagatgctaaagctgcggaagaagcagcgaagaaagcggctgcagacgcaaagaaaaaagcagaagcagaagccgccaaagccgcagccgaagcgcagaaaaaagccgaggcagccgctgcggcactgaagaagaaagcggaagcggcagaagcagctgcagctgaagcaagaaagaaagcggcaactgaagctgctgaaaaagccaaagcagaagctgagaagaaagcggctgctgaaaaggctgcagctgataagaaagcggcagcagagaaagctgcagccgacaaaaaagcagcagaaaaagcggctgctgaaaaggcagcagctgataagaaagcagcggcagaaaaagccgccgcagacaaaaaagcggcagcggcaaaagctgcagctgaaaaagccgctgcagcaaaagcggccgcagaggcagatgatattttcggtgagctaagctctggtaagaatgcaccgaaaacggggggaggggcgaaagggaacaatgcttcgcctgccgggagtggtaatactaaaaacaatggcgcatcaggggccgatatcaataactatgccgggcagattaaatctgctatcgaaagtaagttctatgacgcatcgtcctatgcaggcaaaacctgtacgctgcgcataaaactggcacccgatggtatgttactggatatcaaacctgaaggtggcgatcccgcactttgtcaggctgcgttggcagcagctaaacttgcgaagatcccgaaaccaccaagccaggcagtatatgaagtgttcaaaaacgcgccattggacttcaaaccgtaatcgcgatgttgactgttcggacggtcaacatcaggcaccggttgccacggggttctggtagttttgtgtattttagtttgttaacattctgctaaattatcgtgggccatcggtccagataagggagatatgatgaagcaggcattacgagtagcatttggttttctcatactgtgggcatcagttctgcatgctgaagtccgcattgtgatcgacagcggtgtagattccggtcgtcctattggtgttgttcctttccagtgggcggggcctggtgcggcacctgaagatattggcggcatcgttgctgctgacttgcgtaacagcggtaaatttaatccgttagatcgcgctcgtctgccacagcagccgggtagtgcgcaggaagtacaaccagctgcatggtccgcactgggcattgacgctgtagttgtcggtcaggtcactccgaatccggatggttcttacaatgttgcttatcaacttgttgacactggcggcgcaccgggtactgtacttgctcagaactcgtacaaagtgaacaagcagtggctgcgttatgctggtcataccgccagtgatgaagtgtttgaaaaactgaccggcattaaaggtgcgttccgtacccgtattgcctacgttgttcagaccaacggcggtcagttcccgtatgaactgcgcgtatctgactatgacggttacaaccagtttgtcgttcaccgttcaccgcagccgctgatgtctccggcgtggtcaccagacggttctaaactggcttatgtgaccttcgaaagcggtcgttccgcgctggttattcagacgctggcaaatggcgctgtacgtcaggtggcttcattcccgcgtcacaacggtgcacctgcattctcgccagacggcagcaaactggcattcgccttgtcgaaaaccggtagtctgaacctgtacgtaatggatttggcttctggtcagatccgccaggtgactgatggtcgcagtaacaataccgaaccgacctggttcccggatagccagaacctggcatttacttctgaccaggccggtcgtccgcaggtttataaagtgaatatcaacggcggtgcgccacaacgtattacctgggaaggttcgcagaaccaggatgcggatgtcagcagcgacggtaaatttatggtaatggtcagctccaatggtgggcagcagcacattgccaaacaagatctggcaacgggaggcgtacaagttctgtcgtccacgttcctggatgaaacgccaagtctggcacctaacggcactatggtaatctacagctcttctcaggggatgggatccgtgctgaatttggtttctacagatgggcgtttcaaagcgcgtcttccggcaactgatggacaggtcaaattccctgcctggtcgccgtatctgtgataataattaattgaatagtaaaggaatcattgaaatgcaactgaacaaagtgctgaaagggctgatgattgctctgcctgttatggcaattgcggcatgttcttccaacaagaacgccagcaatgacggcagcgaaggcatgctgggtgccggcactggtatggatgcgaacggcggcaacggcaacatgtcttccgaagagcaggctcgtctgcaaatgcaacagctgcagcagaacaacatcgtttacttcgatctggacaagtacgatatccgttctgacttcgctcaaatgctggatgcacatgcaaacttcctgcgtagcaacccgtcttacaaagtcaccgtagaaggtcacgcggacgaacgtggtactccggaatacaacatctccctgggtgaacgtcgtgcgaacgccgttaagatgtacctgcagggtaaaggcgtttctgcagaccagatctccatcgtttcttacggtaaagaaaaacctgcagtactgggtcatgacgaagcggcatactccaaaaaccgtcgtgcggtactggtttactaagagaattgcatgagcagtaacttcagacatcaactattgagtctgtcgttactggttggtatagcggccccctgggccgcttttgctcaggcaccaatcagtagtgtcggctcaggctcggtcgaagaccgcgtcactcaacttgagcgtatttctaatgctcacagccagcttttaacccaactccagcaacaactttctgataatcaatccgatattgattccctgcgtggtcagattcaggaaaatcagtatcaactgaatcaggtcgtggagcggcaaaagcagatcctgttgcagatcgacagcctcagcagcggtggtgcagcggcgcaatcaaccagcagcgatcaaagcggtgcggcggcatcaacgacgccgacagctgatgctggtactgcgaatgctggcgcgccggtgaaaagcggcgatgcaaacacggattacaatgcagctattgcgctggtgcaggataaatcccgccaggatgacgcaatggtggcatttcagaatttcatcaaaaattaccctgattcaacttacctgccaaacgccaattattggctgggtcagttaaactacaacaagggtaaaaaagatgatgcggcgtactattttgcttcggtagtgaaaaactatccgaagtcaccaaaggctgctgatgcgatgtttaaagtcggcgtcatcatgcaggacaaaggtgacaccgcaaaagcgaaagccgtataccagcaggttatcagtaaataccctggtactgatggcgctaaacaggcacaaaaacgtctgaacgcgatgtaatgcataacacacgaccagaagtcgcattatttctggtcgtgtcgtgcgaatcataagcagttgagtgatctgcatcgaaatttttgttgcgctcaagtctgaaatcagtaatatatgccgccgttgccacgggatatcaaacaaaccgaaagcaacgaaaaagtgggtcgttagctcagttggtagagcagttgacttttaatcaattggtcgcaggttcgaatcctgcacgacccaccactaacatagttagttgtagtatccaacgtagtattgggtgattagctcagctgggagagcacctcccttacaaggagggggtcggcggttcgatcccgtcatcacccaccaccgggtcgttagctcagttggtagagcagttgacttttaatcaattggtcgcaggttcgaatcctgcacgacccaccagttttagcatcgaagacagatgttaagcgtgtaggataacgttgcgtcagcaacggcccgtagggcgagcgaagcgagtcatcctgcacgacccaccactaattacggtgggttcggtggaagtagtttgtagtatccagcgcagtatcgggtgattagctcagctgggagagcacctcccttacaaggagggggtcggcggttcgatcccgtcatcacccaccactcgggtcgttagctcagttggtagagcagttgacttttaatcaattggtcgcaggttcgaatcctgcacgacccaccaattttaacatcaaactcagatgttaagcgtgaaggataacgttgcgccagcaacggcccgtagggcaagcgaagcgagtcatcctgcacgacacaccaatcttaaagattggccccgagtagaaatctttcaggtaacacccgtatgggtcgttagctcagttggtagagcagttgacttttaatcaattggtcgcaggttcgaatcctgcacgacccaccatcctgaatgattaaagcagcataatcccgcaaggggtcgttagctcagttggtagagcagttgacttttaatcaattggtcgcaggttcgaatcctgcacgacccaccaatgtaaaaaagcgccctaaaggcgcttttttgctatctgcgatactcaaagattcgaacctgcagcaggtttgagttgagcgcagcgaaacaacggagccgctcgcggcgacggcccgaagggcgagcgaagcgagtcatcctgcacgacccaccaatgtaaaaaagcgccctaaaggcgcttttttgctattcaggcatcctcaatttcactttgtaaacctgatgacatcgtcagagcttactgtgcaagcaactctacgtcggtggaattaggcgtaattcgagtgacttttccccaccattcgactatcttgtttagcatataaaacaaattacaccgataacagcgaatattacgctaatgtcggttttaacgttaagcctgtaaaacgagatggtaagatgagcgtaatgtttgatccagacacggcgatttatcctttccccccgaagccgacgccgttaagcattgatgaaaaagcgtattaccgcgagaagataaaacgtctgctaaaagaacgtaatgcggtgatggttgcccactactataccgatcccgaaattcaacaactggcagaagaaaccggtggctgtatttctgattctctggaaatggcgcgcttcggtgcaaagcatcccgcttctactttgttagtcgctggggtgagatttatgggagaaaccgccaaaattctcagtccggaaaaaacaattctgatgccgacacttcaggctgaatgttcactggatctcggctgccctgttgaagaatttaacgcattttgcgatgcccatcccgatcgtactgtcgtcgtctacgccaacacttctgctgcggtaaaagcgcgcgcagattgggtggtaacttcaagcattgccgtcgaacttattgatcatcttgatagtttgggtgaaaaaatcatctgggcacccgacaaacatctggggcgttacgtgcaaaaacagacgggtggagacattctatgctggcagggtgcctgtattgtgcatgatgaatttaagactcaggcgttaacccgcttgcaagaagaatacccggatgctgccatactggtgcatccagaatcaccacaagctattgtcgatatggcggatgcggtcggttccaccagtcaactgatcgctgctgcgaaaacattgccacatcagcggcttatcgtggcaaccgatcggggcattttctacaaaatgcagcaggcagtgccagataaagagttactggaagcaccaaccgcaggtgagggtgcaacctgccgcagctgcgcgcattgtccgtggatggccatgaatggccttcagtccatcgcagaggcattagaacaggaaggaagcaatcacgaggttcatgttgatgaaaggctgcgagagagggcgctggtgccgctcaatcgtatgctggattttgcggctacactacgtggataacgaataataaggcgtaacgttacgctttgggggaaagatggatttttttagtgtgcagaatatcctggtacatataccaataggggcaggcggttatgatctctcatggatcgaagcggtaggcacgatcgccgggttgctgtgtattggccttgccagtctggagaagatcagcaactacttctttggcctgatcaacgtcaccttgtttggcattattttctttcagattcagctgtatgccagcctgctattacaggtgtttttctttgccgcgaatatttacggttggtatgcgtggtcgcgacaaaccagtcagaacgaggcggagttgaaaattcgctggttgccattgccgaaggcactcagctggttggcggtttgcgttgtttcgattggtctgatgacggtatttatcaatccggtgtttgcatttttgacccgcgtggcagtcatgatcatgcaagcattaggattacaggttgtgatgcctgaactgcaaccggacgctttcccgttctgggattcatgcatgatggtgttatctatcgtggcaatgattctgatgacgcgtaagtatgtggaaaactggctgttgtgggtgattattaacgtgattagcgtcgttatttttgcacttcagggcgtttacgccatgtctctggagtacatcatcctgacctttattgcgctcaacggcagccggatgtggatcaacagcgcacgtgaaagaggctcacgcgcgctgtcccattaatggtgatgatgtgaatggccagacaccccttcattcaggtggcagtctggcccatgacaaggttgatattccatctgaatggtggcgtgctcaatctgatagtgatccatcaggtagtgttggatctgatccaacaaggcatcgtgatcgtgtggcgggatcacctgcacatgcaacgtcatcaccggcttctcgcctaccatccatacatgtacatggtgcacattgcggacttccgggatttcccggcacatacgacgcttcagttcagcgatatccagcgataccggtgcaccttcaagtaattcattcacgctatctttcaacagtcgccacgcgctacgcagaaccagaagcgacaccagtatcgagagaatggggtcagcaggtgtccagccagtccagataataatcaacgcggcaataatagccccaaccgaacccagcaggtccccgagcacatgcagtgccgctgctcgtacgttgaggtttttctcttcgctgccgtgatgaagtaaccagaaagaaagtatatttgccagcaacccagccacggcaattgccatcatcatgccgccctcgaccggacgcggcgtgcggaagcgttctatcgcctcccagacaatcaaaatggtaattaccacgagggctatggcattcacaaacgccgcgagcgtggtcagtcttagccaaccgaaagtgtggcgaatggtgggaggacgacgtgaaaattgcacggcgagtagggcgaaaagcagggcggcagtatcggtcaacatatgacccgcatcggccagcaatgccagagaaccagaaagaaaaccaccaacgacttctaccagcataaacccggcagtcacgccgaaagcatacaacaagcgacgagcattattatcttctggcaggtgtgaggacgtgtgtgagtgtgagtgcgccatgacgagtcatcccttaattattctcacttaactttatgacatcatactgcttttagaagtgaaaaattaaaagggagagactccgctctcccattattggctattttgcagggttactgcgtggtaccgtcggttttggtatcgacatcattattgatgccatcaccggtttgtacctttttattgatatccggacagcgaccatctttgcacatggtgttcttgtgctcttcatctttggtcattccgtcattgttcattgaagaaccatccgaatgcagcattgtgccaccagaaccggtatttaccccgttattgtcgacgttatttggcgcgacattttcacgggcgtcaggggctacctggcccgcatcagctgcggcgtttgcctggccgttattagtttgcgctccgctatcggcagccagtgcggcaccgctggcaaggcttagagtggcagtcagaaataatgtggccagttttgtcattttcataggatgctcctgttatggtcgttatgtcggataacctcttccaacagtgcatttgcaggtgaatataaggcattggtttaagatttcagccaggttatgaaacgcagcagagaatcttgaaataattaacaaacaaaggagttacagttagaaattgtaggagagatctcgtttttcgcgacaatctggcgtttttcttgctaattccaggattaatccgttcatagtgtaaaaccccgtttacacattctgacggaagatatagattggaagtattgcattcactaagataagtatggcaacactggaacagacatgaattatcagaacgacgatttacgcatcaaagaaatcaaagagttacttcctcctgtcgcattgctggaaaaattccccgctactgaaaatgccgcgaatacggttgcccatgcccgaaaagcgatccataagatcctgaaaggtaatgatgatcgcctgttggtggtgattggcccatgctcaattcatgatcctgtcgcggcaaaagagtatgccactcgcttgctggcgctgcgtgaagagctgaaagatgagctggaaatcgtaatgcgcgtctattttgaaaagccgcgtaccacggtgggctggaaagggctgattaacgatccgcatatggataatagcttccagatcaacgacggtctgcgtatagcccgtaaattgctgcttgatattaacgacagcggtctgccagcggcaggtgagtttctcgatatgatcaccccacaatatctcgctgacctgatgagctggggcgcaattggcgcacgtaccaccgaatcgcaggtgcaccgcgaactggcatcagggctttcttgtccggtcggcttcaaaaatggcaccgacggtacgattaaagtggctatcgatgccattaatgccgccggtgcgccgcactgcttcctgtccgtaacgaaatgggggcattcggcgattgtgaataccagcggtaacggcgattgccatatcattctgcgcggcggtaaagagcctaactacagcgcgaagcacgttgctgaagtgaaagaagggctgaacaaagcaggcctgccagcacaggtgatgatcgatttcagccatgctaactcgtccaaacaattcaaaaagcagatggatgtttgtgctgacgtttgccagcagattgccggtggcgaaaaggccattattggcgtgatggtggaaagccatctggtggaaggcaatcagagcctcgagagcggggagccgctggcctacggtaagagcatcaccgatgcctgcatcggctgggaagataccgatgctctgttacgtcaactggcgaatgcagtaaaagcgcgtcgcgggtaaggtttaattgtcggatgcgccgtcagagtggcgtatccgatgaatcaccacaggcctgataagtcgcgcagcgtcgcatcaggcaatgtgctccattgttagcaacaaaaaagccgactcacttgcagtcggctttctcattttaaacgaatgacgtttacttcgctttaccctggtttgcaaccgccgctgctttcgctgcgatctcgtcagcattacccagataatagcgtttcagcggtttgaaattctcgtcgaactcatacaccagcggcacgccagtcgggatattaagctcaagaatctcttcttcgctcatgttatcaagatatttcaccagcgcacgtaaagagttaccgtgtgcagcgatgatcacgcgctcaccgctcttcatacgcggcagaatggtttcattccagtaagggatcacgcggtcaatggtcagcgccaggctttccgtcagcggcagttctttttcgctcagtttcgcgtaacgcggatcgtgacccggataacgctcatcatctttagtcagttccggcggagtcactgcaaaaccacgacgccactgtttcacctgctcgtcgccatacttttcagcagtttccgctttgttcagaccctgcaacgcaccgtagtgacgttcgttcagtttccaggatttctcaacgggcagccatgcctgatccagttcgtccagcacattccacagggtatggatagcgcgtttcagcacagaggtgtaagcaaagtcaaagctgtaaccttcctctttcagcagcttacctgctgcttttgcttcgcttacgcctttctcagacagatccacgtcgtaccaaccggtgaaacggttttctttgttccactgactttcgccatgacgaaccagaaccagcttagttacagccatatacttactcctcaaatcattttttaatgataataattctcattatattgccgtgacgaagcaacagcaatgcttacgcataaccatagcgaaaatagtgtcgcagtgtaaggttgttgtgaatattgagttgcaaatatgtcggtgtttgctggtgatttgagcaatataaggataaagccctcattacgagggcttcaggtgctactcagcaataaactgatattccgtcaggctggaatactcttcgccaggacgcaggaagcagtccggttgcggccattcagggtggtttgggctgtccggcagaaactcgctttccagtgccaggccttgccagtcggcgtaaggttcagttcctcttgatggcgtgccgccgaggaagttgccggagtagaattgcagagccggagcggtggtgtagaccttcagctgcaatttttcatctgctgaccagacatgcgccgccactttcttgccatcgcctttggcctgtaacaagaatgcgtgatcgtaacctttcactttgcgctgatcgtcgtcggcaagaaactcactggcgatgattttggcgctacggaaatcaaaagacgttccggcgacagatttcagaccgtcgtgcggaatgccgccttcatcaaccggcagatattcgtccgccagaatctgcaacttgtgattgcgcacgtcagactgctcgccgtcaagattgaaatagacgtgattagtcatattcaccgggcaaggtttatcaactgtggcgcgataagtaatagagatacggttatcgtcggtcagacgatattgcaccgtcgcgccgagattacccgggaagccctgatcgccatcatctgaactcagggcaaacagcacctgacgatcgttctggttcacaatctgccagcgacgtttgtcgaacccttccgggccgccgtgcagctggttaacgccctgacttggcgaaagcgtcacggtttcaccgtcaaaggtataacggctattggcgatgcggttggcataacgaccaatagaggcccccagaaacgcagcctgatcctgatagcattccgggctggcacagccgagcagcgcctcgcggacgctgccatcggaaagcggaatacgggcggaaagtaaagtcgcaccccagtccatcagcgtgactaccatccctgcgttgttacgcaaagttaacagtcggtacggctgaccatcgggtgccagtgcgggagtttcgttcagcactgtcctgctccttgtgatggtttacaaacgtaaaaagtctctttaatacctgtttttgcttcatattgttcagcgacagcttgctgtacggcaggcaccagctcttccgggatcagcgcgacgatacagccgccaaatccgccgccggtcatgcgtacgccacctttgtcgccaatcacagctttgacgatttctaccagagtgtcaatttgcggcacggtgatttcgaaatcatcgcgcatagaggcatgagattccgccatcaactcgcccatacgtttcaggtcgccttgctccagcgcgctggcagcttcaacggtgcgggcgttttcagtcaggatatgacgcacgcgtttcgccacgattgggtccagctcatgtgcaacagcgttgaactcttcaatggtgacatcgcgcagagctggctgctggaagaaacgcgcaccggtttcgcactgttcacgacgggtgttgtattcgctgccaaccagggtacgtttgaagttactgttgatgatgacgacagccacacctttcggcatggaaactgctttagtccccagtgagcggcagtcaatcagcaaggcatgatctttcttgccgagtgcggaaattagctgatccatgatcccgcagttacagccaacaaactggttttctgcttcctgaccgttaagcgcgatttgtgcgccgtccagcggcagatgataaagctgctgcaatacggttccgaccgcgacttccagtgaagcggaagaacttaacccggcaccctgcggcacattgccgctgatcaccatgtccacgccgccgaagctgttgttacgcagttgcagatgtttcaccacgccacgaacgtagttagcccattgatagttttcatgtgcgacaatgggcgcatcgagggaaaactcgtcgagctgattttcataatcggctgccatcacgcgaactttacggtcatcgcgtggtgcacaactgatcacggtttgataatcaatcgcgcagggcagaacgaaaccgtcgttgtagtcggtgtgttcaccaatcaaattcacgcggccaggcgcctgaatggtgtgagtggcagggtagccaaatgcgttggcaaacagagattgtgttttttctttcagactcatttcttacactccggattcgcgaaaatggatatcgctgactgcgcgcaaacgctctgctgcctgttctgcggtcaggtctcgctgggtctctgccagcatttcataaccaaccataaatttacgtacggtggcggagcgcaacagaggcggataaaagtgcgcgtgcagctgccagtgttgattctcttcgccattaaatggtgcgccgtgccagcccatagagtaggggaaggaacactggaagaggttgtcataacgactggtcagctttttcaacgccagcgccaaatcgctgcgctgggcgtcggtcaaatcggtgatccgcaaaacgtgggctttgggcagcagtagcgtttcgaacggccaggcagcccagtaaggcacaacggctaaccagtgttcggtttcgacaacggtacggctaccgtctgccagctcgcgctgaacataatccaccagcattggtgatttctgttcggcaaaatattctttttgcaggcggtcttcgcgctcagcttcgttaggcaggaagctatttgcccaaatctgtccgtgcggatgcgggttagagcagcccatcgccgcacctttgttttcaaagacctgcacccacgggtacgtttttcccagctctgcggtttgctcctgccaggttttgacgatttccgtcaatgccgcaacgctcagttctggcaacgttttactgtgatccggtgaaaagcagatcacccggctggtaccgcgcgcgctctggcaacgcatcaaaggatcgttgctttctggcgcatctggcgtgtcagacatcaaggccgcaaagtcattagtgaaaacgtaagtcctggtgtaatcggggtttttatcgcctgtcacccgcacattacctgcgcagaggaagcaatctggatcgtgcgcaggtaacacctgtttggctggcgtttcctgcgccccctgccaggggcgcttagcgcggtgcggtgaaaccagaatccattgcccggtgagcgggttgtagcggcgatgtggatgatcaacgggattaaattgcgtcatggtcgttccttaatcgggatatccctgtggatggcgtgactgccagtgccaggtgtcctgcgccatttcatcgagtgtgcgcgttacgcgccagttcagttcacggtcggctttgctggcgtccgcccagtaggccggaaggtcgccctcgcgacgcggtgcaaaatgataattaaccggtttgccgcaggctttgctgaaggcattaaccacgtccagcacgctgttgcctacgccagcgccgaggttgtagatgtgtacgcctggcttgttcgccagtttttccatcgccacgacgtgaccgtccgccagatccattacgtggatgtaatcgcgtacgccagtaccatcttcggtcggataatcgttaccaaaaatcgccagcgagtcgcgacggcctacagcaacctgggcgatgtatggcatcaggttattcggaatgccttgcggatcttcgcccatatcgcccgacggatgcgcgccaaccgggttgaagtagcgcagcagggcaatgctccagtccggctgggctttttgcagatcggtgaggatctgttccaccatcagcttgcttttgccgtaagggctttgtggtgtgccggtcgggaagctttcaacgtatggaattttgggctgatcgccataaacggtggcggaggagctaaaaataaagtttttgacgttagcggcgcgcatggcgctaatcaggcgcagagtgccgttgacattgttgtcgtaatattccagcggtttttgtaccgattcgccgacggctttcagcccggcgaagtggatcacggtgtcgatagcgtgatcgtgcagtatctcggtcatcaacgcttcgttacgaatatcgccttcaacaaacgttggatgtttgccgcctaaacgctcgataacaggcagtacgctgcgcttactgttacagaggttatcaagaatgatgacatcatgaccgttttgcagtaattgcacacaggtatgacttccaatgtaaccgctaccaccggtaaccagaactctcataattcgctccattaggcttatggtatgaaataaccatagcataacaaagatgcgaaaagtgtgacatggaataaattagtggaatcgtttacacaagaatttagccgttttttatgcgcgattaagtgattataaaacagagggtttatgaatgattgcgctttttatctgaaaaaagaagcggtttcatgcctgcatgcgtcgaaccgttggccggagagggcgcttaggccgcctccggcaaggtcagcactaccgactcaatatatttttgtcagcacatagcgatagagtccaccgtccggcacgaactcaaggcgatgggtaatacaggcaggcgcatcttcagcgtggtgcgaaacaaacaacaattgcgtttcaccttcgctaatcagcacatcaacaaaacggcggataagctggcgattgagcggatcaagcccctgtagtggttcatcgagaataagcaacgtcggatgtttcaccagtgcgcggacgatcagcgccagacgctgctgtccccaggaaagactatggaacggagcgtcagccgtacgtttatcaatgccgagaatatccagccactgctgcaccagtttttgctggcgatccgaaacggcctgataaatgccaatcgaatcaaaatagccagaaagaatcacattacgcacggtagtgctgacccggtaatccagatgcaaactactgctgacgtaaccgatatgctttttgatatcccagatggtttcgccgctgccgcgacgtcggccgaaaagcgtcaaatcgttgctgtaaccttgcggatgatcgccagtaatcaggcttaataacgtcgattttcccgcaccatttggcccgacaatttgccagtgctcgccaggattcacctgccagctaaggttattaagaatggggcgatcgttataagaaaccacgccattattcagcacaatgcgcggttcgttggtgggtaaggcgtgacgtgctgaaggttcatccggctccggcagttgcacaccttcaagctgttcgctatgcgccagttgcgcgacgagtgcttgctggagcagttcctctttagcgcccgtttccgctaacgtacaatccgccagcacgccagcaaactggacaaattccgggatctcatcgaagcgattgagcaccagtaccagagtaataccggactgatgtaacgaggcgagtcgctcagccagctgctgacgtgaggcaacatccaggccatcgaacggctcatcaagaatcaacaagtcaggctccgacatcagcgcctgacacagcagggtttttcgcgtctcgccagtggaaaggtatttaaagcgtcggtcgaggagggcggtaataccgaactgctgcgccagttgcatgcaacgcggtgcatccttaacttcatcctgaatgatctcagccgtagtgcgtccggtgtcatcttcgccagggccgagcatatcggtgttattccgctgccattcgtcgctgacgagcttttgcaattgctcgaaggagagacgagtgatgtgggaaaactggctttgccgttcacctttcaaaagcggaagttcccccgccagcgcacgggccagcgccgactttccacttccattcgaaccgacaaacgcccaactatcacccgcgtttaacgttagctgaggcaattgcagcgtttttgtgtcgctaagacgaaacgtgccttgcaaaatttgcaacgatgacattttatatcccattttgtgcagcgattactgatagggatacgtgtttcataacaaattgtcaacacgcttagcatagcgtggcgataatcacgctgtcggcattaaagtaggccgtgacattctgtccttgctgaagagaagtcgcttcattaaccggcactgtggcgcacagtgtttgcccgtcgggtagcgccattaatacttcgcactgctctgcgccgcgctcaatatgactaataatacccggtaattggttgtcggcgttttgtgcgaccgcttcgtcctgagtaatgcctacccacggcgcttttagcaatatcaacacttctttgccttcatccagccccagacgtgcgccgctttgtgcggtaattgcgactttcaggcgtgtttttccgtcagccagtaagacatcaacatgctgttgaacgtcatcatgatcgcgggcggtgatggtgccgaaccactggttacgggcgctggtttgcagtgaaaaacgtgagatcgcggccagcaggctgttcagcggcagggcgtcatcgtcacttaacacatcaaaggctttttgctggatttgcgccagtaagtcatagagctgaatcagtcgctgaccatagcgggtcagtactgcgccgccgccacctttaccgcctgttgcgcgctcgaccagaatatgctcacttaactgattcatctcgttaatggcatcccaggcgcttttatagctgataccggcatctttcgctccctggctaatggaaccggaaagcgcaatgtgttttagtagcgaaatccggcgcgggtcggcgaataatttttgttggagcttaagggtgagaaggatttcggcctgcataacaatgtcctggcaaaagtcttattgtgacggaaaacgaacgccacgcaaagctgaccgcacaaaaggggagtgcttttctgtgcttagcggttagaatagtctcatgactatatctggagttgaccatgttagagttattaaaaagtctggtattcgccgtaatcatggtacctgtcgtgatggccatcatcctgggtctgatttacggtcttggtgaagtattcaacatcttttctggtgttggtaaaaaagaccagcccggacaaaatcattgattccctgaatgcccgcttagtcgggcattttctttttctcaacttcctgcttttcctgccgatattttttcttatctacctcacaaaggttagcaataactgctgggaaaattccgagttagtcgttatattgtcgcctacataacgttacattaaggggttaccaatggctcgtaaatggttgaacttgtttgccggggcggcactctctttcgctgttgctggcaatgcactggcagatgaagggaaatcacggtgttcgccgccgcatcactgactaacgcaatgcaggacattgctacgcagtataaaaaagagaaaggcgtggatgtggtttcttctttcgcttcgtcatctactctcgcccgtcagattgaagcgggtgcgcctgcggatctgtttatttctgccgatcagaaatggatggattatgcggttgataaaaaagcgatcgatacggcttcgcgccagacactgctcggcaatagcctggtcgttgtagcaccgaaagccagcgagcagaaagatttcaccatcgacagcaaaaccaactggacttcgctgctgaatggcggtcgtctggcggttggcgatccggaacatgttcccgctggcatttatgcaaaagaagcactgcaaaaactgggcgcatgggatacgctctctccgaaactggctccggcggaagatgttcgtggcgcgctggcgttggtcgaacgcaatgaagcgccgctgggcatagtttacggttctgacgcagttgccagcaaaggggtaaaagtggtcgccaccttcccggaagattcgcataaaaaagtggaatacccggttgctgttgtggaagggcataacaatgcgacagtgaaagcattttatgattatttgaaagggccgcaggctgcggaaatctttaaacgttacggatttacaaccaagtaatgatactgaccgatccagaatggcaggcagttttattaagcctgaaagtttcttccctggctgtgctgtttagcctgccgtttgggatcttttttgcctggttactggtgcgttgcacgtttccgggcaaagctctgctcgacagcgtactgcatctaccgctggtgttaccgcccgtggtcgtcggttacttattattagtttcgatgggacggcgcgggtttatcggtgaacgtctgtatgactggtttggcattaccttcgcctttagctggcgcggcgcggttctcgctgccgccgtcatgtcgtttccgctgatggtgcgggcaattcgtctggcgctggaaggggttgatgtcaaactggaacaggccgcaagaacactgggggccgggcgctggcgcgttttctttactatcacgataccgctgaccttaccgggaattattgttggtacggtactggcttttgctcgttctctcggtgaatttggcgcaaccatcacctttgtgtcgaacattcctggtgaaacgcgaaccattccttctgccatgtataccctgattcagacccccggcggggaaagtggcgcggcgagactgtgcattatttctattgcgctggcgatgatctccctgttgatttcagaatggctggccagaatcagccgtgaacgggcggggcgctaatcatgctggaactgaatttttcccagaccttgggcaaccattgcctgaccattaatgaaacgctgcccgccaatggcatcactgctatctttggcgtctccggtgccggaaaaacttcgctgattaacgccatcagtggactgacgcgcccgcaaaaagggaggattgtcctcaatggtcgggtactaaatgatgccgaaaaaggtatctgcctgacgccagaaaagcgtcgcgttggctatgtttttcaggatgcgcggctgtttccgcattacaaagtgcgtggcaatctgcgctacggcatggcgaaaagcatggtcgatcagttcgataagctggtggcgcttttaggcattgaaccgttgcttgaccgtttaccaggcagcctgtccggaggcgaaaaacagcgcgtagcgattgggcgggctttgctgacggcaccagaattgctgttgctggatgaaccgctggcgtcactggatattccgcgtaaacgcgaactgttgccttatctgcaatgtctgacgcgggaaatcaacatcccgatgttgtatgtcagccattcgctggatgagatcctccatctggcagacagagtgatggtattggaaaacggtcaggtgaaagcctttggcgcactggaagaagtctggggtagtagcgtgatgaatccgtggctgccgaaagagcaacaaagtagcattctgaaagtgacggtgcttgagcatcatccgcattacgcgatgaccgcgctggcgctgggcgatcagcatttgtgggtcaataagctggacgaaccgctgcaagctgcgctacgtatccgcattcaggcttccgatgtttctctggttttacaaccgccgcagcaaaccagcattcgtaacgtattgcgggcaaaagttgttaatagttatgacgacaacggccaggtggaagtggagctggaagtcggcggtaaaacgctgtgggcgcgtatcagcccgtgggccagggatgaactggtgatcaaacctggcctgtggctgtacgcgcaaattaaaagtgtgtcgataaccgcctgattaaatcaggtggctataaatgaactgggcaatgctgtcggtggtgttatcaccaatcacaatgttggcgcgcgcttttaccgcgtcatcggcgttgcccatcgccacgcctgtaccagcggcctccagcatactgatatcattaaagttatcgccgaacgccacgacgttttccatcgaccagccttgcgcctcaacccatttcgtcaaacgtttacctttgctgttgccgccgcgtgcaatatcaacctgatcgtgccaggaccattcacactccagtcccagttcatgttcgacatgcttaccaaaatgctgcaattgcggcaggtcatcgtgcgtcagggcgaacttccatacggcgttaacttgttgcgccgtttcagccagagaagcgacttgtgtgaaagtcggacgctgttccggcggcagggtttgcgcccagttagacgtgcgaatgacatgcccggtcgggtgctcatagaccattgcatcatccacatacatcagaccgtgaatgtggtgttcattcagcatctcaatgagttgcagggctttattaacgggcattgggtccgcttccagcacggtttttgcatgataatcatacaaataggtgccattacagcaaatagcaggtgtatccagcgccagcgcctgataaaaaggatgaatagcgacgtgatggcgacctgtgacgatgattaattgatagcctgcttcgcgagcgcgggccagggcttctatcgatgaaggaagcagggtctttttcggggtcaataaggtgccgtctaagtcgagagcaatcacgcgtgtggtcatggcgtattccagattaaggttaagaattttcgtctgcgcgaatggtacaccgataccactatcggacaaaattctgcgttttaattcagcattcaccgccaaaagcgactaattttagctgttacagtcagttgctaaatgcaaaggagcattcatgaagcaaacagtttatatcgccagccctgagagccagcaaattcacgtctggaacctgaatcatgaaggcgcactgacgctgacacaggttgtcgatgtgccggggcaggtgcagccgatggtggtcagcccggacaaacgttatctctatgttggtgttcgccctgagtttcgcgtcctggcgtatcgtatcgccccggacgatggcgcactgacctttgccgcagagtctgcgctgccgggtagtccgacgcatatttccaccgatcaccaggggcagtttgtctttgtaggttcttacaatgcgggtaacgtgagcgtaacgcgtctggaagatggcctgccagtgggcgtcgtcgatgtggtcgaggggctggacggttgccattccgccaatatctcaccggacaaccgtacgctgtgggttccggcattaaagcaggatcgcatttgcctgtttacggtcagcgatgatggtcatctcgtggcgcaggaccctgcggaagtgaccaccgttgaaggggccggcccgcgtcatatggtattccatccaaacgaacaatatgcgtattgcgtcaatgagttaaacagctcagtggatgtctgggaactgaaagatccgcacggtaatatcgaatgtgtccagacgctggatatgatgccggaaaacttctccgacacccgttgggcggctgatattcatatcaccccggatggtcgccatttatacgcctgcgaccgtaccgccagcctgattaccgttttcagcgtttcggaagatggcagcgtgttgagtaaagaaggcttccagccaacggaaacccagccgcgcggcttcaatgttgatcacagcggcaagtatctgattgccgccgggcaaaaatctcaccacatctcggtatacgaaattgttggcgagcagggactactgcatgaaaaaggccgttatgcggtcgggcagggaccaatgtgggtggtggttaacgcacactaaccgctgatttaaccggcgcagtctctcctgcgccggtgtattaacctatctcctgtaacgcatgtctctggcgttcgacgatattggtccacaaattgtctttatcgtcagtccacaaattaatcagcaaggcaaaaaagcgttcagctgccggagaaagcacggcatctttgcggcgaataatccccaatgtccgacgtataacgggttccaccagtgggataccaataatcgaagaatagggcgcatggggcattgccagaccaggaagcgccgaaatccccagtcctgcctccactagtcctaatgacgtcgaaagatgacgcacttcgtaaaaccagtccagcttccagggcttgtcggctagctgttgttctatcaacaatcggttgccgctggaggaacgtacgccaatcattttgtaacccactaactcctgccattctacaagctgctttttggccaatggatggtcacgccgacaggccagcacgaatggctcgttgaccagtggggtaaaatcaatggatgaatttgtgacgttgttcatgtttatgccaaagtctgattcgttacacagcaccgattccatgcaattattcgtgccttgttccagaatccgcactttaatattgggatacagctcattaaatttaccgattgccagcggtaaaaaataaaatactgcggtcggaatacacgctaacgtcaccataccacgatgataagcattcatatcacgaatattaaaaagccttwccgaattwstktatkatggngnnnttgaggtgctccagtggcntctgnttctatcagctgtccctcctgttcagctactgacggggtggtgcgtaacggcaaaagcaccgccggacatcagcgctatctctgctctcactgccgtaaacatggcaactgcagttcacttacaccgcttctcaacccggtacgcaccagaaaatcattgatatggccatgaatggcgttggatgccgggcaacagcccgcattatgggcgttggcctcaacacgattttccgccatttaaaaaactcaggccgcagtcggtaacctcgcgcatacagccgggcagtgacgtcatcgtctgcgcggaaatggacgaacagtggggctatgtcggggctaaatcgcgccagcgctggctgttttacgcgtatgacaggctccggaagacggttgttgcgcacgtattcggtgaacgcacgatggcgacgctggggcgtcttatgagcctgctgtcaccctttgacgtggtgatatggatgacggatggctggccgctgtatgaatcccgcctgaagggaaagctgcacgtaatcagcaagcgatatacgcagcgaattgagcggcataacctgaatctgaggcagcacctggcacggctgggacggaagtcgctgtcgttctcaaaatcggtggagctgcatgacaaagtcatcgggcattatctgaacataaaacactatcaataagttggagtcmtkrtacgttcatcgaagctgatgtgcaaacgccaaatggtgttgtcgagtacgagggtagtgccagaattgacggcgtaccgggtactgccgcaccggttgcgctcactttcctgaatgccgctggaaccaaaaccggaaaagttttcccgactgataatcagattgattattttgacgatgtcccggtgacctgtatcgatatggcgatgccagtcgtcattattccggctgaatatctgggaaaaacaggttatgaattaccggcggaactggatgccgacaaagcattattagcccgcattgaatctatccgtctacaagcgggtaaagcaatgggcttaggtgatgtcagtaatatggttatccctaaacctgtgcttatttctccagcgcagaaaggcggggcaattaatgtgcgttattttatgccgcattcttgccatcgcgcgctggcgataaccggtgctattgctatttccagtagttgtgcattggaaggcaccgtcacccgacaaatcgtcccttctgtaggatacggcaatatcaatattgaacaccccagtggtgcgctcgatgttcatttaagtaatgaaggtcaggatgccacgacgttacgcgcatctgttattcggacgaccagaaaaatattttccggtgaagtttatcttccctgaaaaaattcgttgtcaggataaggacaatcaataaaggacttctgtatgagtcatacagaaagaacaggattttaaatgaataagaaatcgttatggaagctaattctgatattagcgatcccatgtattattggttttatgccagctccggcaggattaagcgaactggcgtgggtgctttttggtatttacctggcggccattgtggggctggttatcaagcctttcccggaacctgtcgtactgttaattgccgttgctgcctccatggtggtggtcggtaacttatccgacggtgcgtttaagaccaccgccgtattaagcggttactcttcaggtactacctggctggtgttctcggcgtttaccttaagcgccgcatttgtgaccaccggtttaggtaaacgtattgcctatctgctgattggtaaaatcggtaacaccacgctgggtctgggttacgttacggtattcctcgatctggtactggctccggcaacaccgtctaacaccgcgcgtgcgggcggcattgtgttaccgatcatcaacagcgtggcggtggctttggggtccgaaccggaaaaaagtccgcgtcgtgtcggacattacctgatgatgtccatttacatggtcaccaaaaccaccagctatatgttctttaccgcaatggcggggaacattctggcgctgaaaatgatcaacgacattctgcacctgcaaattagctggggtggatgggcactggccgccggattgccgggcatcattatgctgctggtcaccccactggtgatttataccatgtatccgccagaaattaagaaggtggataataaaaccatcgctaaagcgggccttgccgaactgggaccgatgaaaatccgcgaaaaaatgctgctcggtgtctttgtgctggcgctgctgggctggattttcagtaagtctctgggggttgatgaatccaccgtggcaatcgttgttatggcgaccatgctgctgctgggtatcgttacctgggaagacgtggttaaaaataaaggcggctggaataccttaatctggtacggcggtattatcggattaagctccttattatcgaaagttaaattcttcgaatggttagctgaagtctttaaaaataacctggcatttgatggtcacggtaacgttgctttcttcgttattattttcctcagcattatcgtgcgttatttcttcgcttccggtagtgcctatatcgttgctatgttaccggtatttgccatgctggcgaacgtctccggcgcaccgttaatgttaaccgcgctggcactgttgttctccaactcctatggcggcatggttactcactatggcggcgcggcaggtccggtcatctttggcgtgggttacaacgatattaaatcctggtggttggtcggtgcggtactgacgatattaaccttcctggtgcatatcaccctcggcgtgtggtggtggaatatgctgatcggctggaacatgctgtaaatatactcgtcatacttcaagttgcatgtgctgcgtttgcgttcgctcaccccagtcacttacttatgtaagctcctggggattcactcacttgtcgccttcctgcaactcgaattatttagagtatatccatttattatctttctgcgcacttcacggtgcgcagatatctggagcatttgatgatcaagttatctgaaaaaggcgtgtttctcgccagtaataacgaaataattgccgaagaacatttcaccggcgaaattaaaaaagaagaagccaaaaaaggcactattgcctggtctattctctcttctcataatacgtccggaaatatggataaacttaaaattaagtttgattcattagcctctcacgatattacctttgttggtattgtacagaccgctaaagcgtccggaatggaacgtttcccgctgccgtatgtgctgaccaactgccataactcactctgcgccgtcggcggcaccattaacggtgatgaccatgtttttggtttatcggcggcccagcgttatggcggtatttttgtgcctccgcacattgctgtcatccatcaatatatgcgtgagatgatggcaggcggcggcaaaatgatcctcgggtcagacagccacacccgttacggtgcattagggacaatggcagtcggtgagggtggcggtgagttggtaaaacagctgcttaatgacacctgggatatcgactatccgggcgtggttgcggtgcatctgaccggaaaacctgcgccgtatgtggggccacaggatgtggcgctggctatcattggcgcggtgttcaaaaacggttacgtcaaaaacaaagtcatggagttcgttggaccgggcgttagcgcgctctctaccgatttccgtaacagcgttgacgtgatgaccacggaaaccacctgtttaagctccgtctggcaaactgatgaagaagtgcataactggctggcgctgcacggtcgcggccaggattactgccagcttaaccctcaaccgatggcgtactacgatggctgcatcagcgttgatttaagcgccatcaaaccaatgattgcgctgccgttccacccgagcaacgtgtatgaaatcgacacactgaaccagaacctgaccgacattctgcgtgagattgaaattgagtccgaacgcgtggcgcacggtaaagccaaactctcgctgctggataaagtggaaaatggtcgcctgaaagtgcagcaggggattatcgcgggctgttctggcggtaactacgaaaacgtcatcgcggcggcgaatgcactgcgcggtcaatcctgtggcaatgacaccttctcgctggcagtttacccgtcatcacagccggtgtttatggatctcgccaaaaaaggtgtggtagcagatttgattggcgcaggggcaatcatcagaaccgcgttctgcggcccatgctttggcgcgggcgatacgccaatcaacaacggtttgagtattcgccacaccacgcgtaacttcccgaaccgcgaaggctctaagccagctaatgggcagatgtcagcggtggcgttgatggacgctcgttctatcgctgcgactgcggcaaacggtggctatttaacctctgccagcgaacttgattgctgggacaacgtgccggagtacgccttcgatgtaacgccgtataaaaaccgtgtttatcagggctttgtgaaaggggcaactcagcaaccgctgatttacggaccgaacattaaagactggccggaattgggtgcgctgactgacaatatcgtcctgaaagtgtgctcgaagatcctcgacgaagtgaccaccaccgacgaactgattccttccggtgaaacctcttcttatcgttcaaatccgattggtctggcggagtttaccctgtcacgccgcgatcccggttatgttggcagaagtaaagcgactgctgagctggaaaatcagcgtctggcggggaatgtcagcgagctgacagaggtgtttgcgcgcattaagcagattgctggtcaggagcatattgatccgctgcaaactgaaattggcagcatggtatatgcggtgaaaccaggcgatggttctgcgcgtgaacaggcggcgagctgccagcgtgtgattggcggtctggcgaatattgccgaagagtacgcgactaaacgctaccgttctaacgtcatcaactgggggatgttaccgctgcagatggcggaagtgccaacctttgaagtgggggattacatttacatccctggcattaaagcggcgctggataatccgggtacgacgtttaaaggttatgtgatccatgaagatgcgccggtaacggaaattacgctctatatggaaagtctgactgctgaagagcgcgagattatcaaggcgggtagtttgattaacttcaataaaaaccgtcagatgtaaaaagcgccatgtgaatgtaggtcgcattcggcacttattgtcggatgcgatgcttgcgcatcttatccgacctacgaatcgcatcgaatctgtaggccagataaggcattttcgcagcatccggcacttattgtcggatgcgatgcttgcgcatcttatccgacctacaaatcgcatcgaaccgtaggccggataaggcgtttacgccgcatccggcaaatagttaattgctcttacttcttcgcctctgcaaccactttactacccacgccgcggttattgtattcccacatgcggttgtagttagtgtcattcagattgcgctgtatttcgtcgttatcatctacgctgccggtattacccgcaaacggacgattagagatcaccgcatcggcccacggtttagccgtgttaaaaccttcgttgatggcgctatcacggatcaccacctgaccgttggtattggcatcaacatccagcgagcggcccagttgcgccacaccatcaccgaaagcattgaaacggctgtttacggcgaggaaaccgtagtaaatgttggacagcgtagccggtgcaaacacatacgcttcttgctgagtacgtgagttcaccacgcggaattcggtgttatcgaacaccactgcgccgcgaccagaaacgatatccacatccccttcaatgtagctgttggtcaccagcgtacgcggctgacggttggtttccagacggttctgcacaccgctgttggtgacaaagaaggtgttctgacgaccgagaatgttaacgttgttaatctgtacctggtcaccatcagtacgcagtgccaccgccggatggttacctgcatctacgctatcgcccagcgtgttttcgatggtcagattttgcagttgcaggccattgttttgtgaccagaagaccgcagagcagagaacaccgatactgtcgctgcgtttgctctggcagctatcgtacatataccacgctggtttacctggcatatatttgccgcgcgggttgacgtcgtgacgccagtcggcagggctcatgccaccatcaagggaaagcccaatcttcacatcaatcggtttttcacctgtaccgtacagagtaattccacccggagcggcagggacatataccgttccctgatactcaccaggcatcacggcaatatactggcgcttgttggtacgcttgataattgccgcatctaccgccgcctgaatcgtggtatgcgttacaccttgagtgcccgccgggccgacaacaaagtcaggttgcgcaggcagggtaatcggggaaggattccacgctgcagcacctggtgtcagggatgcaaaatagtgttgagcatcgaaattctgcgcttcttttgccgacagaatcgggcgagaagaggtaccaggcgcggtttgatcagaaggacgttgatcgggcggggttgagctacaggcggtcagcgtcacgccaaaagccaatgccagcgccagacgggaaactgaaaatgtgttcacaggttgctccgggctatgaaatagaaaaatgaatccgttgaagcctgcttttttatactaagttggcattataaaaaagcattgcttatcaatttgttgcaacgaacaggtcactatcagtcaaaataaaatcattatttgatttcaattttgtcccactccctgcctctgtcatcacgatactgtgatgccatggtgtccgacttatgcccgagaagatgttgagcaaacttatcgcttatctgcttctcatagagtcttgcagacaaactgcgcaactcgtgaaaggtaggcggatccccttcgaaggaaagacctgatgcttttcgtgcgcgcataaaataccttgatactgtgccggatgaaagcggttcgcgacgagtagatgcaattatggtttctccgccaagaatctctttgcatttatcaagtgtttccttcattgatattccgagagcatcaacatgcaatgctgttgggatggcaatttttacgcctgttttgctttgctcgacataaagatatccatctacgatatcagaccacttcatttcgcataaatcaccaactcgttgcccggtaacaacagccagttccattgcaagtctgagccaacatggtgatgattctgctgcttgataaattttcaggtattcgtcagccgtaagtcttgatctccttacctctgattttgctgcgcgagtggcagcgacagggtttgttgttatatggccttcagctattgcctctcggaatgcatcgctcagtgttgatctgattaacttggctgacgccgccttgccctcgtctatgtatccattgagcattgccgcaatttcttttgtggtgatgtcttcaagtggagcatcaggcagacccctccttattgctttaattttgctcatgtaatttatgagtgtcttctgcttgattcctctgctggccaggattttttcgtagcgatcaagccatgaatgtaacgtaacggaattatcactgttgattctcgctgtcagaggcttgtgtttgtgtcctgaaaataactcaatgttggcctgtatggcttcagtgattgcgattcgcctgtctctgcctaatccaaactctttacccgtccttgggtccctgtagcagtaatatccattgtttcttatataaaggttagggggtaaatcccggcgctcatgacttcgccttcttcccatttctgatcctcttcaaaaggctacctgttactggtcgatttaagtcaacctttaccgctgattcgtggaacagatactctcttccatccttaaccggaggagggaatatcctgcactcgcgtacccatcgacgaactgtttcaaggcttcttgggcgtcgctggcgtgcgttccactcctgaagtgtcaagtacatcgcaaagtctccgcaattacacgcaagaaaaaaccgccatcaggcggcttggtgttctttcagttcttcaattcgaatattggttacgtctgcatgtgctatctgcgcccacagcatccagtggtcatagcagtcgctgatgttctcggcttcgataactctgttgaatggttctccattccattcacctgtgactcggaagtgcatttatcatctccataaaacaaaacccgccgtagcgagttcagataaaagaaatcctcgtcagtgcgaggatgctgttcattgctgctatacacttttttgctctcaacgtaagcggtagcccattctgttgggttggtgcagttgcttttaggaaatgctatttaccccttaaatttcggctgaaagagctaaaatccatgcaaaaaatttacgcaattttgtgtattattgtgcagtaagtaatgagctattttctgcgcaaaaaatggatggtaaatttgtccgggtcaggaaaaattttatgggcgctaaacatgaaaaaagattcgtatccttatttgatttgcatgacagtttcagggctgatctttattttccttttcttctggtggcgggcagatatctacagggtcacgtttcttaatcagagtatatcccactattacattctgtttagcatgggaatagcttttctgttatctctgttttgggttaagaaggggatagtaaaacaaagaggctggaagagtctgtcagcataccttaaggtttatgcagggatgtgcatatttgctggattttttctgattataccccttacgacactaacttattttttgcctggagagacatcgtcttatgttgcaccgtatcggtatacttccggtagttcaaaaagttgttctggagctgaggtggatgaccccgaactacatgagaatattcgcatttgctatccgtatggcaattatgagtacgataatattatctatgttgaaaagaaaattaatatattaggtgcggtagtgacatatgcacagaccgcgcgtgatgatactgaatgatatagtatatagcgggcaagttttagttaatttatcgaggtaatataatttacctcgactcgtttgttctggtattaatatttcgctttacgaccgatttttatctgatgatatcatgcggttttcatatactgacttactgtcttttctccgttagcgattttctcctgctcagcgatgattttatctttggcttctagttaatttcgctcacttcgaacctctctgtttactgataagctccagatcctcctggcaacttgcacaagtccgacaaccctgaacgaccaggcgtcttcgttcatctatcggatcgccacactcacaacaatgagtggcagatatagcctggtggttcaggcggcgcatttttattgctgtgttgcgctgtaattcttcaatttctgatgctgaatcaatgatgtctgccatcttccattaatccctgaattgttggttaatacgcttgagggtgaatgcgaataataaaaaaggagcctgtagctccctgatgattttgcttttcatgttcatcgttccttaaagacgccgtttaacatgccgattgccaggcttaaatgagtcggtgtgaatcccatcagcgttaccgtttcgcggtgcttcttcagtacgctacggcaaatgtcatcgacgtttttatccggaaactgctgtctggcttttttgatttcagaattagcctgacgggcaatgctgcgaagggcgttttcctgctgaggtgtcattgaacaagtcccatgtcggcaagcataagcacacagaatatgaagcccgctgccagaaaaatgcattccgtggttgtcatacctggtctctctcatctgcttctgctttcgccaccatcatttccagcttttgtgaaagggatgcggctaacgtatgaaattcttcgtctgtttctactggtattggcacaaacctgactccattttgagcgaggctatgtgccatctcgatactcgttcttaactcaacgggagatgctttgtgcatacagctccccgtttattatttatctcctcagccagccgctgtgctttcaggggatttcggataacagaaaggccgggaaatacccagcctcgcttcgtaacggagtagacgaaagtgatcgtgcctacccggatattatcgtgaggatgcttcatcgccattgctccccaaatacaaaaccaatttcagccagtgcttcgtccattttgtcgatgaactccggcaccatctcatcaaaactcgccatgtacttttcatcccgctcgaccacgacataatgcaggccttcacgcttcatgcgtgggtcatagttggcaaagtaccaggcatcttttcgcgtcacccacatgctgtactgcacctgggccatgtaagccgattttatggcctcgaaaccaccgagccggaacttcatgaaatcccgggaggtaaacgggcatttcagttcaaggccgttgccgtcactgcataaaccatcgggagagcaggcggtgcgcatactttcgtcgcgatagatgatcggggattcagtaacattcacgccggaagtgaattcaaacagggttctggcgtcgttctcgtattgttttccccaggtcagtgctttggcattaacttccggagccacaccggtgcaaacctcagcaagcagggtgtggaagtaggacattttcatgtcaggccahttctttcctgagcggggctttgctatcacgttgtgaacttctgaagcggtgatgacgccgagccgtaatttgtgccatgcatcatccccctgttcgacagctctcacgtcgatcccggtacgctgcaggataatgtccggtgtcatgctgctaccttctgctctgtgactttctgtttcaggaatccaagaaccttcacagcttcagcctgtgttagttctgaagatgcgcgaatgtcgcggcgaaatatctgggaacagagcggcaataagtcgtcatcccatgttttatccagggcgatcagcagagtgttaatctcctgcatggtttcatcgttaaccggagtgatgtcgcgttccggctgacgttctgtagtatatgcagtattttcgacaatacgctcggcttcatccttgtcatagatgccagcaaatccgaaggccagacgggcacactgaatcatggctttatgccgtaacatccgtttgggatgcgactgccacggccccgtgatttctctgccttcgcgagttttgaatggttcgcggcggcattcatccatccattcggtaacgcagatcggatgattacggtccttgcggtaaatccggcatgtacaggattcattgtcctgctcaaagtccatgccatcaaactgctggttttcattgataatgcgggaccagccatcaacgccaaccaccggaacgatgccgttctgcttatcagggaaggcgtaaatttctttcgtccacggattaaggccgtactggttggcgacgatcaacaatgcgatgaactgcgcatcgctggcatcacctttaaatgccgtctggcgaagagtggtgatcagttcctgtgggtcgacagaatccatgccgacacgttcagccagcttccctgccagcgttgcgagtgctgtactcatccgttttatacctctgaatcaatatcaacctggtggtgagcaatggtttcaaccatgtactggatgtgttctgccatgcgctcctgaaactcaacatcgtcatcaaacgcacgggtaatggcttttttgctggccccgtggcgttgcaaatgatcgatgcatagcgattcaaacaggtgctggggcaggcctttttccatgtcgtctgccagttctgcctctttctcttcacgggcgatctgctggtagtgacgcgcccagctctgagcctcaagacgatcctgaatgtaataagcgttcatggctgacctcctgaaaatggctgtgaaaatatcgcccgcgaaatgccaggctgattaggaaaacaggaaaggggattagtgattcaggccgttaccgcgtccgtcgagaaaaacttccacgagcaaatcacgggtataagtgcgctcgatgccgcgatgcagataaagccgtccgcgtaaattagctgatgcagtccaggtaccatctttgtgtttgaccagcattcctggcatgaccgcacctcgattaacggtctgcgttccataatgttgatgaaccataaaaactcctgcccgtaagctgggctgctgaacatatagagacttctgcgcgtattcaggcggtggatggccgccggttgtcataactaagccgcctcgttgaagcgactaaggtatgaaatgttgagttaatttcagctggtcacaccgacgttcacgcgtccgtttcacccctcgcactccccgaagcctgctgaaattcaaactgcggatctaagcggtcatcgcaacggtgaatcaggtagttgccgtatcgttgtgttgttgcgatgaacttatttaaaactatagttgttttatcgtcaacaacaaaagttgttttattggttgttttagatataactggttgtatttaggatggatttattttgtgacttgaatcgcatagcgataactgaagcgaggttatggtggtttttttaacggtgtgtgtgtgatgaggggagggcaaaagaaaacccggcacggtgaccgggattcttacgccgttaggtaaagatattattgcggtggcttaatattactacctagagcaaagataggaattagttctttactgaatgagcacaatgcccagttgataatttttaattggtactacccatgcttcctatatgtctgcggcatgctcccaataaccttaccgaagatgaacacccggttcatctcgtctttctcgatcgggtcccacggtgagtagcttttgttatcagagatgaccagcagcttatccttcatcatttgcaggcgctttacatgggctgtgtcgtcgtacagaaacgcatagataccatcaccgtcgaaagatttaactgtgatatcaacgaacagcagatcacctggttcgatcgttcctgacatgctgtcaccacgcacgttaatgatgcggatattttccgccttcctaccatcgaacatgtgacgagcatcgtcaaacgagtactcaaccgagcgtagaacttctacaaactcacggttgatgactcccggcccagcactgacttctatatcaagaacgtcaatcttgaagtatttggaatggctgacagttgattgtattggttgcactgtactgtctgacatatttccaacgccagaagataaccattctgcgcgcacacccaaagcgttcgcgatctccacgattttagttgtttgattagctttccctgtttcgattttctgaatagcagcctggctaaccccgaccaaatccccaagcgccttttgtgtaaggcctcgcgctaatctggcttctttaagtctttctgagagtgttgttttcatagtccaaatgtacaaccaaggttttatcccatcaaacgaaaatggttgttgactaaaaacaaccatagttttaatcttgattcaaattaaccacggaggttgttatgaacccagctatcaaaacagcgatcaatatcgttggttcacaaaagaaactgggcgctgcttgcgaagtttcacagcaggccgtctataagtggcttcacaacaaagcaaaggtatcccctgaacatgtcggcagcattgttacggctactggtggagtagtgaaggcataccagattcgcccggatcttccgaagttgtttccacacaccgaaaagaacgcagcttaaatttccatttcacgctctttaacaataagcaatcaacttaacagtcaattcaaactaaaggagtcaattatgcaaccacttacataccaacagactagcggatttagcccgactgcggtgataaatcgttctcaaacaaaacaggtgccaggccacgaaaaaatccgtgatgccgtccgcgcctggtcggctgtagataatcaggatgtcgttgccacactcattgtgaatgagtatcgggagcagggcggcggcaccatcgatttccctgatgatgtcagccgtgcacgccagaagctgttccgcttcctcgataacaaattcgattctgaaaaataccgaaataacgtgcgtgaactgaccccggcaattctggcggtactaccgctggaatatcgcggttacctggttgagcaggatagcttcatggctaggttggctgaaatggaaaaggaactcagtgaggcaaaacaggctgtcattctcaacgcaccacgccaccagaaactgaaggaaattagtgaaggtattgtgtcgatgtttcgtgtggacccagatctggctggtccattgatggcgatggttactaccatgctgggggcgatatgacaggttcagaaatggcgaaagccggtctgctggaacagaaccgactttcaggtgcaaatcgtaacacactcattgcgggaggaattatggcaaacactgctgagatattcaattttccagtgccggatgcggtacaaaaggagccgcgcgtggcagatctcgatgatggttatacgcgcattgcaaatgagttgctggaagctgtgatgctggccggattaacacagcaccagcttctggtctttctggctgtcatgcgcaaaacatatggctttaataaaaaactggattgggttagcaacgagcaactttccgaattaaccgggatattgccgcacaagtgttctgctgcaaaaagtgttctggtaaagcgtgggatttttattcagagcgggcggaataccggcattaataatgtggtcagtgaatggtcaacattacccgaatcaggtaagaaaaataaagtttacctgaaagaggtaaatttacctgaatcaggtaaaaaagtttacccacatcaggtaaaggcgtttacccgaatcaggtaaacacaaaagacaaactaacaaaagacaatataaaacctttttcgtccgagaattctggcgaatcctctgaccaaccagaaaacgatcttcctgtggtgaaaccggatgctgcaattcagagcggcagcaagtgggggacagcagaagacctgaccgccgcagagtggatgtttgacatggtgaagaccatcgcgccatcagccagaaaaccgaattttgcagggtgggctaacgatatccgcctgatgcgtgaacgtgacggacgtaaccaccgcgacatgtgtgtgctgttccgctgggcatgccaggacaacttctggtccggtaacgtgctaagtccggccaaactccgcgacaagtggacccagctcgaaatcaaccgaaacaagcaacaggctggcgtgatagccggcaaaccaaaactcgacctgacgaacactgactggatttacggggtggagctatgaaaaacatcgccgcacagatggttaactttgactgtgagcagatgcgccggatcgccaacaacatgccggaacagtacgacgaaaagccacaggtacagcaggtagcgcagatcatcaacggtgtgttcagccagttactggcaactttcccggcgagcctggctaaccgtgaccagaatgaactgaacgaaatccgccgccagtgggttctggctttccgggaaaacgggatcaccacaatggaacaggttaacgctggaatgcgcgtagcccgtcggcagaatcgaccattcctgccatcacccgggcagtttgtcgcctggtgccgggaagaagcatctgttaacgccgggctgccaaacgtcagcgagctggttgatatggtttacgagtattgccggaagcgtggcctgtatccggatgcagagtcttatccgtggaaatcgaacgcgcattactggttggttaccaacttgtaccagaacatgcgggccaatgcgctgactgacgcggaattacggcgcaaggctgccgatgaactgacctgtatgacagcgcgaattaaccgtggtgagacgatacctgaaccagtaaaacaacttcctgttatgggcggtagacctctaaatcgtgcacaggctctggcgaagatcgcagaaatcaaagctaagtttgggctgaaaggagcaagggtatgacgggcaaagaggcaattattcattacctggggactcataagaaattctgtgcgcaggacgttgccgcggtaacaggcgcaacggtaaccagcataaatcaggctgcggctaaaatggcgcgggcaggaatcctggtcgttgatggtaaggtctggcgaacggtgtattatcggttcgctaccagagaagaatgggaaggaaaggtgagcacgaatttgatttttaaggagtgtcgccagagtgccgcgatgaaacgggtattgagggtatataaaagaacatcaatgggtacacaatgatgaaacaggtgagttgagttcaaactgtagtacaattctctccagtttgaacaggaaagaatatgctatgaatccttatatttatcttggtggtgcaatacttgcagaggtcattggtacaaccttaatgaagttttcagaaggttttacacggttatggccatctgttggtacaattatttgttattgtgcatcattctggttattagctcagacgctggcttatattcctacagggattgcttatgctatctggtcaggagtcggtattgtcctgattagcttactatcatggggatttttcggccaacggttggacctgccagccattataggcatgatgttgatttgtgccggtgtgttggttattaatttattgtcacgaagcacaccacattaaaaataatttgtttttaaacgactaaaatatggaggttcgtatatttatatgggcctcgttttatgctttttgttaatgtctttagtttttattcattcttttatgctttcaggattatggtgtaagaaaattgcaatacgattattgttgtatatttaagataatgtgaccttaattgtctttttaaataaaaattaaacaaaaatcatatctcaccactaaggtttataaaagcatactttagcaggtgtcaccatgaaaaaagccatagcatatatgcgattttcatcaccaggtcagatgtctggtgattcattaaaccgccagagaaggcttattactgaatggctaaaggtaaatagtgattattaccttgataccgtaacgtatgaagatttggggttaagcgcattcaatggaaagcatgcacaatcaggagcttttcggaatttttagatgctatagaacatggttatatattgccagggactacattgttagttgaaagtctggacagactttcaagagaaaaagtcggtgaagcgattgagcgtctgaaattgattttgaatcacggtattgatgttataactctttgcgataatacagtctataatattgactcattgaatgagccatattcattaataaaagccatacttatagcacaaagggcaaatgaagaaagcgagataaagtcaagtcgggttaaattatcatggaagaaaaaacggcaggatgcactggagtcaggcacgattatgacggcgtcttgtccgagatggctctcattggatgacaaaagaacggcttttgttccagaccccgacagggtgaaaactattgagctaatttttaaactcaggatggaaaggcgctcattgaatgcaatagccaagtatttaaatgatcatgctgtaaagaatttctcaggaaaagaaagtgcatggggaccttctgtaattgaaaaattattagcgaataaagctctgataggtatatgcgtaccttcatatcgtgcaagaggtaaaggaataagtgaaatcgctggctattatcccagagtcatatcagatgatttgttttacgctgtgcaggaaattcggttggcaccttttggtattagcaatagtagcaaaaatcctatgttgataaatctacttcgaacagttatgaagtgcgaggcttgtggtaataccatgattgttcatgcggtatctggaagtttgcatggctattatgtttgtccgatgagaagactgcatcgatgtgacaggccatcaataaagagagatttggttgattataatatcattaatgagttgctttttaattgtagtaaaatccaaccagttgaaaacaagaaagatgctaatgaaactttagagttgaaaattattgagctccagatgaaaattaataatttaattgctgcattatctgttgcgcctgaagttaccgctatagcagaaaaaatcagagtattagataaggaattacgaagggcttctgtatcattaaaaactttgaagagtaaagcggtgagttcacttggtgattttcatgctattgacttaaccagtaaaaatgggcgagagctatgtcgtacacttgcctataaaacattcgaaaaatcataatcaatacagataataaaacctgtgatatctattttatgaatggcattgtttttaaacactatcctttaatgaaaacaatatccgcccagcaggcgataagtactctcaaatatatggttgatggtgaggtttatttttgagtaataatcactttttcaaccgtgctatagtaagaaagttaggtaagtacaataaaattatctatcctgaacgaagcgtcctgagctatggttttactatagggactgccaatggatgctggcgttctcgttctagcagttcaacaatacccaatcacaaaacaattcactgataacaaactttgtgcacgtgcttggttatggcgagcaggtgatgtgatgttaactgcctgccagaacgttactccactacttcaggttgcggagcaccgcgaagccggccgctttacttctatcgagcatgaatatccccagatactcaacagagcgcgagcaatcctcgccagataaacggcacatgtaaaattccagccgtggctggatgataagtggagtcgagtgttaccatatttccgtcagaatctgttccaataaagtcactagttagaaatactgccagcattctacgatgacggaagtgctggcatttttgggtaatatgcgagtccatttcataaaatacgggtgctgtaaactggacgatataatctaaaatataccattaccagtagccttcaaatcgctatgtgccgatacggataaaattatattgattgtgcacataccttattggatattactgaggggtatttatataaggtgtaacgatgatgtggaactttgacagtgccgacttaagtgcaatagcagcaggtatttctgcgtttggcacattagccgcagcggggtcggcgcttgcaagttggtacacgtcaaaaaaagcgctgcagctacaaaatagagtttacctttatgagtctttaaaggcttgcgctgagagagccaattcatcagctaaagataagcgcggatctgaatggagcgttaatgatgcagcggatatcatcaggtgcctagtacgggcgatggagatcatcaagcaggatagccagcagaaagaaggtaatcaggcattaatgttgaaacagtactttgttaatctgctaataatggaactgtacgaggaagttcataacggtgatgcggctgattctgtttttaaaagtacggaacctacacaagtacttgataacttatggagcaaatggcaggaggctatagctttttttgatatttggaattacccagttgcgactgaggaagacttggcagactaattttcagcacatttgatttccaataatcaaccagccataatcatgccattggagcctgaacaactccggtgacttctgcgctaaacggggacgtttatgcgcacatacaaaccaacctatcttctccattcacagatgcagaaatgcacctgcgatatattgtatccagcgtttgacctctgcggaggtgaagcgtgaatctcccacaagatggcatcaaattacatcgcggtaacttcaccgctatcggtcggcagatccagccttatctggaggagggcaaatgctttcgcatggtgcttaaaccgtggcgtgagaaacgcagtctttcccagaatgcactcagccacatgtggtacagcgaaatcagtgaatacctcatcagcaggggtaaaacgttcgctactccagcttgggtaaaagatgctctcaaacacacatatctcggttatgaaaccaaagacctggttgatgtcgtaaccggtgatatcaccactatccagtcgttacgccatacctccgatcttgataccggagagatgtatgtcttcctgtgtaaggttgaagcctgggcggtgaatattggctgccacctgactattccgcagagctgcgagttccagctgctccgcgacaagcaggaggcgtaatggctacaccgcttattcgtgtcatgaacggacacatctacagagtaccagatcgtcgtaagcgtaaaccggagctgaagccttccgaaataccaacactgctcggatataccgccagcctggttgataaaaaatggttgcgactggcagcaaggaggaatcatggctgatttgagaaaagcagcgcgtagtcgggaatgccaggtaagaatccctggcgtatgtaatggcaaccctgaaacgtctgtactggcacatatccggctgactggattgtgcggcaccggtaccaaaccgccagacctgattgccaccattgcatgttctgcctgccacgacgaaatcgaccgccgcacacattttgtcgatgctgcatatgcaaaagaatgcgcgctggaaggtatggcgagaacacaggttatctggctgaaagagggggttattaaggcgtgaatacctacagcatcacattaccctggcctccgagcaataatcgctattaccgccataatcgcgggcgcacgcacgtcagcgcgaggggcaggcataccgcgataacgtcgcccgaatcattaaaaacgcaatgctggatatcggcctggctatgcctgtgaaaatccgcattgagtgccacatgccggatcgccgtcgccgtgacctggataatctgcaaaaagccgcttttgacgcactcactaaagcaggtttctggctggatgatgctcaggtcgttgattaccgcgttgtgaagatgcctgttaccaaaggtgggaggctggaactgaccatcaccgaaatggggaatgaatgatgtttgagttttatatggcagaacgtcttcgccaccgctgggggcgtctgcgcttatatcgtttccccggttctgttttgaccgattaccgaatactgaagaattacgccaaaaccctgacaggagcaggagtatgaagtcagagataacaatcaactaatactgtttcgttgatttttgcttgtaattggcgttctggtctgatttttgtggagtaagttgatgcgtgatattcagatggttcttgagcgttggggagcgtgggcggctaataatcatgaagatgtgacctggtcgtccattgccgccggttttaagggattaattacttcaaaagtaaaatctcgcccgcaatgttgtgacgatgacgcgatgatcatttgcgggtgcatggcccgtctgaaaaagaacaacagcgatttgcacgatttattagtagattattatgtagtcggtatgacattcatgtcactggcaggtaagcattgctgctctgatggttatatcgggaaaaggttacagaaggctgagggcataattgaagggatgttaatggcattagatatccggttagagatggatatcgttgttaataactctaattaatacgccaattatttactaaaagttattaaaaatggggcgttgaaacgcccccaaaaataaagggtaatatataacagaaggtttgtatagttagaagcaaggttgtgcttctaaaggaagtggcttgagggagccacttatatgttggggaggcaaagcctcccacaacatatcttttagtaatcaaattagaactggtaaaccatacctacagcaacgatatcatcggtagcaacgccagatgctttcgtgaaatcgctcttatcaatcaggttgattttgtagtcaacaaaagtggacatatttttgttgaagtaataggttgcacctacatcaacatattcaaccaggtcctgatcaccccaaacacccaagtcttttactttagaatgcaggtaagcaacggatggacgcaggccgaagtcgaactgatattgtgcaacagcttcgaagttttgtgctttgttggcaatatggttattaccaaaaacagtcatgttctgggtttcagaataggtggtggccagatagatgttgttcgcatcatatttcagaccagctgcccatacttcagcattttgaccagaagcattcagaccgttgttaccgtagataacctgattattagtgcgatcagatttagcataggttgcacccacgccgaatccttcatactcataagtagttgagaaaccgaaaccatcgccattagcttcagttacttcatttcggtcatttttgccctgatactgagctgcaaagttcaggccatcaaccagaccaaagaagtcgttgttacgataagttgcaacacctgtggtgcgaccagtcatgaatacatctgtttgggtccaggtatcgccaccgaattctggcagaacgtcagtccacgcaccgatgtcgtatgctacaccgtagttacggccgtaatcgattgagccgtagtcaccgaatttcaggcctgcaaatgcaagacgggttttgtctttggaggaaccttgagattcagcgcggttgcctttgaattcatattcccactgaccgaaaccagtcagttgatcgttgatttgggtttcacctttgaagccaagacgggcataagtagtatcaccatcatctgcatcattagaggagaagtagtgcttagcattaactttcccgtacagatccagcttgttactgtctttattataaatttcagctgcctgagcagacatcgccatcagtactgatgcagctacagcagaaattgccactgttaattttttcatcgtgagcccttttttttgaactattattaaaaaatgatgtcactgcgcgataaatattcatctaatcaatgtgattatttcaagatgtaagttttagtttctcatttaatttgtgaagtagatctctatttttatctgaactttttctatcgaaacctatttatggctcttatttgaacaaaaataaacctattagctaatttatattaatggctgttatttatgggggttctataattcggcagtttaatttaaatcaactaaaaataacctctgaaattatttattggttatttgttgaggttttcttatgtatttgtggtggtgttttgaacactcggtagcattctcataaatatcattcagtggtttacgtacgtaaaaaattggttatgctgttaagagtggttacttcgtcacacagcttaaacccgccgtcgagctggtttttccattttttgagtctcgatattagctgataacttaatacctgagttattcactgactccgagtctgttacgtttctgcttttttgcgatacgttgtattccctcaatttacacccgctttgtctgcgaggtggggttatgaaatccatggataagttaacaacgggtgtcgcctatggcacctcagcaggtagtgccggttactggtttttacagctgctcgataaagtcacgccctcacagtgggcagcaataggtgtgctgggtagcctggtatttggcctgctgacgtacctgacaaacctttatttcaagattaaagaagataagcgcaaggctgcgagaggtgaataatgcctccatcattacgaaaagccgttgctgctgctattggtggcggagcaattgctacagcatcagtgttaatcactggcccaagtggtaacgatggtctggaaggtgtcagctacataccatacaaagatattgttggtgtatggactgtatgtcacgggcatacaggaaaagacatcatgctcggtaaaacgtataccgaagcagagtgcaaagccctcctgaataaagaccttgccactgtcgccaggcaaattaacccgtatatcgaagtcgatataccggaaacaacgcgcggcgctctttactcattcgtttacaacgtgggtgctggcaatttcagaacatcgacgcttcttcgcaaaataaaccagggcgatatcaaaggcgcatgtgatcagctacgtcgctggacatatgctggcggtaagcaatggaaagggctgatgactcgccgtgagattgagcgtgaagtctgtttgtgggggcagcaatgagcagagtaactgcgattatcttcgctctggttatctgcatcatcgtctgcctgtcatgggctgttaatcattaccgtgataacgccatgacctacaaagaacagcgcgacaaagccacatccatcatcgctgacatgcagaagcgtcaacgtgacgtagcagaactcgatgccagatatacaaaggaacttgctgatgctaacgcgactatcgaaagtctccgtgatgatgtttctgctgggcgtaagcggctgcaagtcgccgcctcctgtgcaaagtcaaagaccggagccagcagcatgggcgatggagaaagcccaagacttacagcagatgctgaactcaattattaccgtctccgaagtggaatcgacaagataactgcgcaggttaactacctgcaggaatacatcaggacgcaatgcctgaaataatttttttgcaaatcacaaagtcaatttaatgagcctcgcgatacggggcttttttgcaataaatgcgtaccgcaacgcatgttttttttacaccgaacctgcccctttggaatgggcctttgaggataccagttagtgctggcgagcctcggtgggctggtttcctgtgcggcaaaggttcatttcaaatggtaggtaaacgttatgaatatcgtgccacttaattacaaaggtgaaattgtcagtttcaacactgatggttggatcaacgtcacaggtgttgctgagagatttgggaaacgcattgataactggatgcgtttggcagaaacgcttgaatacgttcgtgctttagacgaagcgttgaccgggaaagaatctcaaattttacatccctcacaatcgaggtatgtaaaaaccagcaaggcacgaaaggacaggggtggtggtacgtggctacatccaaaactttcagttgcatttgcccgttggtgtgatgctcgttttgctgtgtggtgcgacctgcacattgatagtctgcttcgcggtgaactgactgagcagcagaaatatgagcaagcatgtcgcattcgcgatgaccggaaatcaaaagccagcaatggggcaagagagatggctcgctggcgatgggataagccggttattgaagcaaatgttgagtactggcgcgagcaactgcagttgactctcgatatcgcgtgctgatggcaaacgcaaaactgcgttatcgaaaaaatcaaagcattactagaactgagcaacggctatccattacaaagcccatctacgggtgggcttgataatggcttataccctgcacgggataacttaactgatatcccttttaacggataaaggcattcaagcctgacacatcatgcgctgtatcgtcgccgtattcccgtattaacagagaccgtagcccgacggggaactccttctgcgcgagtgtgcgggaataatcaaaaacgatgcacaccggggttaccgggtacacatatttcatcatgccagcgagtccggttctggcacggaagaaaccggacgttatgatttagtgcggaaatatttgtgtagtgttctgaatgttctcagtaaagagtaatgaattatcaaaggtatagtaataccttttgttttcgtggatatttgtaatccatctgaaaacccctgctgtagcaagatttttcctgtattcgtaaaatgataactctcctgatttgaatccttttaaggtggcttctataaggcatttattttttgaaaatcttacatttacaaccttaccctgtccttttattaaaaccgtattatcgttttcaagaacaagatgaatattctctgtagctaaatagtaaatgtaatgtgagacattgtgacgttttagttcagaataaaaccagtgatagtttaaattatttcgcactttatcgaatatttgtttaaaaatggcaacctgagccattgtagtaccttccatgtgatatgaggggcgtagtctgcacgattatctaaattgcttcaatctggtctgatctgttttctgagcaattcagtaatgtcactcttttctttgtttgcttcaggagaaactcttttttctgagcacagtctccggcggcaggcttcaatgacccaggctgagaaattcccggaccctttttgatcaagagcgatgttaatttgttcaatcatttggttaggaaagcggatgttgcggattgttgttctgcgsgttctgttcttygwtgacatrakgttgtcccgtattyagtgtygctgatttgtattgtctgaagttgtttttacgttaagttgatgcagatcaattaatatgatacctgcgtcataattgattatttgacgtggtttgatggcgtagatgcacgttgtgacatgcagatgataattattatcattttgcgggtcctttccggcgatccgacaggttacggggcggcgacctcgcgggttttcgctatttatgaaaattttccggtttaaggcgtttccgttcttcttcgtcataacttaatgtttttatttaaaataccctctgaaaagaaaggaagcgacaggtgctgaaagcgagctttttggcctctgtcgtttcctttctctgtttttgtccgtggaatgaacaatggaagtcaacaaaaagcagctggctgacattttcggtgcgagtatccgtaccattcagaactggcaggaacagggaatgcccgttctgcgaggcggtggcaagggtaatgaggtgctttatgactctgccgccgtcataaaatggtatgccgaaagggatgctgaaattgagaacgaaaagctgcgccgggaggttgaagaactgcggcaggccagcgaggcagatctccagccaggaactattgagtacgaacgccatcgacttacgcgtgcgcaggccgacgcacaggaactgaagaatgccagagactccgctgaagtggtggaaaccgcattctgtactttcgtgttgtcgcggatcgcaggtgaaattgccagtattctcgacgggctccccctgtcggtgcagcggcgttttccggaactggaaaaccgacatgttgatttcctgaaacgggatattatcaaagccatgaacaaagcagccgcgctggatgaactgataccggggttgctgagtgaatatatcgaacagtcaggttaacaggctgcggcattttgtccgcgccgggcttcgctcactgttcaggccggagccacagaccgccgttgaatgggcggatgctaattactatctcccgaaagaatccgcataccaggaagggcgctgggaaacactgccctttcagcgggccatcatgaatgcgatgggcagcgactacatccgtgaggtgaatgtggtgaagtctgcccgtatcggttattccaaaatgctgctgggtgtttatgcctactttatagagcataagcagcgcaacacccttatctggttgccgacggatggtgatgccgagaactttatgaaaacccacgttgagccgaccatccgcgatattccgtcgctgctggcgctggctccgtggtatggcaaaaagcaccgggataacacgctcactatgaagcgtttttccaatggtcgtggcttctggtgcctgggcggtaaagcggcaaaaaactaccgtgaaaagtcagtggatgtggcgggttatgatgaacttgctgcctttgatgaggatattgaacaggaaggctctccgacgttcctgggtgacaagcgtattgaaggctcggtctggccaaagtccatccgtggctccacgccaaaagtgagaggcacctgtcagattgagcgtgcagccagtgaatccccgcattttatgcgttttcatgttgcctgcccgcattgcggggaggagcagtatcttaaatttggcgacaaagagacgccgtttggcctcaaatggacgccggatgacccctccagcgtgttttatctctgcgagcataatgcctgcgtcatccgccagcaggagctggactttactgatgcccgttatatctgcgaaaagaccgggatctggacccgtgatggcattctctggttttcgtcatccggtgaagagattgagccacctgacagtgtgacctttcacatctggacagcgtacagcccgttcaccacctgggtgcagattgtcaaagactggatgaaaacgaaaggggatacgggaaaacgtaaaaccttcgtaaacaccacgctcggtgagacgtgggaggcgaaaattggcgaacgtccggatgctgaagtgatggcagagcggaaagagcattattcagcgcccgttcctgaccgtgtggcttacctgaccgccggtatcgactcccagctggaccgctacgaaatgcgcgtatggggatgggggccgggtgaggaaagctggctgattgaccggcagattattatgggccgccacgacgatgaacagacgctgctgcgtgtggatgaggccatcaataaaacctatacccgccggaatggtgcagaaatgtcgatatcccgtatctgctgggatactggcgggattgacccgaccattgtgtatgaacgctcgaaaaaacatgggctgttccgggtgatccccattaaaggggcatccgtctacggaaagccggtggccagcatgccacgtaagcgaaacaaaaacggggtttaccttaccgaaatcggtacggataccgcgaaagagcagatttataaccgcttcacactgacgcaggaaggggatgaaccgcttcccggtgccgttcacttcccgaataacccggatatttttatctgaccgaagcgcagcagctgactgctgaagagcaggtcgaaaaatgggtggatggcaggaaaaaaatactgtgggacagcaaaaagcgacgcaatgaggcgctcgactgcttcgtttatgcgctggcggcgctgcgcatcagtatttcccgctggcagctggatctcagtgcactgctggcgagctgcaggaagaggatggtgcagcaaccaacaagaaaacactggcagattacgcccgtgccttatccggagaggatgaatgacgcgacaggaagaacttgccgctgcccgtgcggcactgcatgacctgatgacaggaaaacgggtggcaacggtacagaaagacggacggagagtggagtttacggccacttccgtgtctgacctgaaaaaatacattgcagagctggaagtgcagaccggcatgacacagcgacgcaggggacctgcaggattttatgtatgaaaacgcccaccattcccacccttctggggccggacggcatgacatcgctgcgtgaatatgccggttatcatggcggtggcagcggatttggtgggcagttgcgggcgtggaatccaccgagtgaaagtgtggatgcagccctgctgcccaactttacccgtggcaatgcccgcgcagacgatctggtgcgcaataacggctatgccgccaacgccatccagctgcatcaggatcatatcgtcgggtcttttttccggctcagtcatcgcccaagctggcgctatctgggcatcggggaggaagaagcccgtgccttttcccgcgaggttgaagcggcatggaaagagtttgccgaggatgactgctgctgcattgacgttgagcgaaaacgcacgtttaccatgatgattcgggaaggtgtggccatgcacgcctttaacggtgaactgttcgttcaggccacctgggataccagttcgtcgcggctgttccggacacagttccggatggtcagcccgaagcgcatcagcaacccgaacaataccggcgacagccggaactgccgtgccggtgtgcagattaatgacagcggcgcggcgctgggatattacgtcagcgaggacgggtatcctggctggatgccgcagaaatggacatggataccccgtgagttacccggcgggcgcgcctcgttcattcacgtttttgaacccgtggaggacgggcagacccgcggtgcaaatgtgttttacagcgtgatggagcagatgaagatgctcgacacgctgcagaacacgcagctgcagagcgccattgtgaaggcgatgtatgccgccaccattgagagtgagctggatacgcagtcagcgatggattttattctgggcgcgaacagtcaggagcagcgggaaaggctgactggctggattggtgaaattgccgcgtattacgccgcagcaccggtccggctgggaggcgcaaaagtgccgcacctgatgccgggggactcactgaacctgcagacggctcaggacacggataacggctactccgtgtttgagcagtcactgttgcggtatattgctgccgggctgggtgtctcgtatgagcagctttcccggaattacgcccagatgagctactccacggcacgggccagtgcgaacgagtcgtgggcgtactttatggggcggcgaaaattcgtcgcatcccgtcaggcgagccagatgtttctgtgctggctggaagaggccatcgttcgccgcgtggtgacgttaccttcaaaagcgcgcttcagttttcaggaagcccgcagtgcctgggggaactgcgactggataggctccggtcgtatggccatcgatggtctgaaagaagttcaggaagcggtgatgctgatagaagccggactgagcacctacgagaaagagtgcgcgaaacgcggtgacgactatcaggaaatttttgcccagcaggtccgtgaaacgatggagcgccgcgcagccggtcttaaaccgcccgcctgggcggctgcggcatttgaatccggactgcgacaatcaacagaggaggagaagagtgacagcagagctgcgtaatctcccgcatattgccagtatggcctttaatgagccgctgatgcttgaacccgcctatgcgcgggttttcttttgtgcgcttgcaggccagcttgggatcagccgcctggcggatgcggtgtccggcgacagcctgactgccggagaggcacccgcggcgctggcgttatccgttgatgatgacggaccacgacaggcccgcagttatcaggtcatgaacggcatcgccgtgctgccggtgtccggcacgctggtcagccggacgcgggcgctgcagccgtattcggggatgaccggttacaacggcattatcgcccgtctgcaacaggctgccagcgatccgattgtggacggcattctgctggatatggacacaccgggcgggatggtggcgggagcatttgactgtgctgacatcatcgcccgtgtgcgagacataaaaccggtatgggcgctggccaacgacatgaactgcagtgcaggtcagctgcttgccagcgccgcctcccggcgtctggtcacgcagaccgcccggacaggctccatcggcgtcatgatggctcacagtaattacggtgctgcgctggagaaacagggcgtggaaatcacgctgatttacagcggcagccataaggtggatggcaacccctacagccatctaccggatgatgtccgggaaacactgcagtcccggatggatgcaacccgccggatgtttgcacagaaggtgtcggcatataccggcctgtccgtgcaggctgtgctggataccgaggctgcagtgtacagcggtcaggaggccattgatgccggactggctgatgaacttgtgaacagtaccgatgcgatcaccgtcatgcgtgatgcactggatgcacgtaaatcccgtctctcaggagggcgaatgaccaaagagactcaatcaacaactgtttcagccactgcttcgcaggctgacgttactggcgtggtgcaagcgacggagggcgagaacgccagcgctgcgcagccggacgtgaacgcgcagatcaccgcagcggttgcggcagaaaacagtcgcattatggggatcctcaactgtgaggaggctcacggacgcgaagaacaggcatgcgtgctggccgaaacccccggtatgaccgtggaaacggcccgccgtattctggccgcagcaccacagagtgcacaggcgcgcagtgacactgcgctggatcgtctgatgcagggggcaccggcaccgctggctgcaggtaacccggcatctgatgccgttaacgatttgctgaacacaccagtgtaagggatgtttatgacgagcaaagaaacctttacccattaccagccgctgggcaacagtgacccggctcataccgcaaccgcgcccggcgggttgagtgcgaaagcgcctgcaatgaccccgctgatgctggacacctccacccgtaagctggttgcgtgggatggcaccaccgacggtgctgccgttggcattcttgcagttgctgctgaccagaccagcaccacactgacgttctacaagtccggcacgttccgttatgaggatgtgctctggccggaggctgccagcgacgagacgaaaaaacggaccgcgtttgccggaacggcaatcagcatcgtttaacctgacccttcatcactaaaggccgcctgtgcggctttttttacgggatttttttatgtcgatgtacacaaccgcccagctgctggcggcaaatgagcagaaatttaagtttgatccgctgtttctgcgtctctttttccgtgagagctatcccttcaccacggagaaagtctatctctcacaaattcctggactggtaaacatggcgctgtacgtttcgccaattgtttccggtgaggttatccgttcccgtggcggctccacctctgaatttacgccgggttatgtcaagccgaagcatgaggtgaatccgcagatgaccctgcgtcgcctgccggatgaagatccgcagaatctggcggacccggcttaccgccgccgtcgcatcatcctgcagaacatgcgtgacgaagagctggccattgctcaggtcgaagagatgcaggcagtttctgccgtgctcaagggcaaatacaccatgaccggtgaagccttcgatccggttgaggtggatatgggccgcagtgcggcgaacaacatcacgcagtccggcggcacggagtggagcaagcgtgacaagtccacgtatgacccgaccgacgatatcgaagcctacgcgctgaacgccagcggcgtggtgaatatcatcgtgtttgatccgaaaggctgggcgctgttccgttccttcaaagccgtcaaggagaagctggatacccgtcgcggctctaattccgagctggagacagcggtaaaagacctgggcgaagcggtgtcctataaggggatgtatggcgatacggcgatcgtcgtgtattccggacagtacgtggaaaacgacgtcaaaaagaacttcctgccggacaacacgatggtgctggggaacactcaggcacgcggtctgcgcacctatggctgcattcaggatgcggacgcacagcgcgaaggtattaacgcctctgcccgctacccgaaaaactgggtgaccaccggcgatccggcgcgtgagttcaccatgattcagtcagcaccgctgatgctgctggctgaccctgatgcgttcgtgtccgtacaactggcgtaatcatggcccttcggggccattttctctctgtggaggagtctatgacgaaagatgaactgattgcccgtcttcaggtgctgggtgagcaactgaaccgtgatgtcagcctgacggggacgaaagaagaactggtgctccgtgtggcagagctggaagaggagcttgatgacacggatgacgctgccggtcaggacacatctgtcagcccggaaaatgcgctgaccggacatgaaaatgaggtggtatcagcgcagccggataccgtgattgatacggctgctctggtcacggtcgtggcactggtgacgctgcatactgatgcacttcacgccacgcgggatgagcctgtggcatttgtgctgccgggaacggcgtttcgtgtctctgccggtgtggcagccgaaatgacagaacatggcctggccagaatgcaataacgggaggcgctgtggctgattccgataacctgttcgatgctgccattgcccgcgccgatgaaacgatacgcgggtacatgggaacgtcagccaccatgacatccggtgagctgtccggtgctgtgatacgtggtgtttttgatgaccctgaaaatatcagctatgccggacagggggtgcgcgttgaaggctccagcccgtccctgtttgtccggactgatgatgtgcggcagctgcggcgtggagacacactgaccatcggcgaggaaaacttctgggtggaccggatttcgccggatgatggcggaagctgtcatctctggcttgggcgtggcgtgccgcctgccgttaaccgtcgccgctgaaagggggatgtatggccataaaaggtcttgagcaggccgttgaaaacctcagccgtatcagcaaaacggcggtgcctggtgccgccgcaatggccattaaccgcgttgcgtcatccgcgatatcgcagtctgcgtcacaggttgcccgtgagacaaaggtacgccggaaactggtaaaggaaagggccaggctgaaaagggccacggtcaaaaatccgcaggccagaatcagggttaaccggggggatttgcccgtaatcaagctgggtaacgcgcgggttgtcctttcccgccgcagacgtcgtaaaaaggggcagcgttcatccctgaaaggtggcggcagcgtgcttgtggtgggaaaccgtcgtattcccggcgcgtttattcagcaactgaaaaatggccggtggcatgtcatgcagcgtgtggccgggaaaaaycgttaccccattgatgtggtgaaaattccgatggcggtgccgctgaccacggcgtttaaacagaatattgagcggatacggcgtgagcgccttccgaaagagctgggctatgcgctgcagcatcaactgagaatggtaataaagcgatgaaacatactgaactccgtgcagccgtactggatgcactggagaagcatgacaccggggcgacgttttttgatggtcgccccgctgtttttgatgaggcggattttccggcagttgccgtttatctcaccggcgctgaatacacgggcgaagagctggacagcgatacctggcaggcggagctgcatatcgaagttttcctgcctgctcaggtgccggattcagagctggattcgtggatggagtcccggatttatccggtgatgagcgatatcccggcactgtcagatttgatcaccagtatggtggccagtggctatgactaccggcgcgacgatgatgcgggcctgtggagttcagccgatctgacttatgtcattacctatgaaatgtgaggacgctatgcctgtaccaaatccagtaatgccggtgaaaggtgccgggaccacactgtgggtttataaggggaacggtgacccttatgcgaacccgctttcagacgttgactggtcgcgtctggctaaagttaaagacctgacgcccggcgaactgaccgctgagtcctatgacgacagctatctcgatgatgaagatgcggactggactgcgaccgggcaggggcagaaatctgccggagataccagcttcacgctggcgtggatgcccggagagcaggggcagcaggcgctgctggcgtggtttaatgaaggcgatacccgtgcctataaaatccgcttcccgaacggcacggtcgatgtgttccgtggctgggtcagcagtatcggtaaggcggtgacggcgaaggaagtgatcacccgcacggtgaaagtcaccaacgtgggacgtccgtcgatggcagaagatcgcagcacggtaacagcggcaaccggcatgaccgtgacgcctgccagcacttcggtggtgaaagggcagagcaccacgctgaccgtggcattccagccggaaggcgcaaccgacaagagtttccgtgcggtgtctgcggataaaacaaaagccaccgtgtcggtcagtggtatgaccatcaccgtgaacggcgttgctgcaggcaaggtcaacattccggttgtatccggtaatggtgagtttgctgcggttgcagaaattaccgtcaccgccagttaatccggagagtcagcgatgttcctgaaaaccgaatcatttgaacataacggtgtgaccgtcacgctttctgaactgtcagccctgcagcgcattgagcatctcgcccagctgaaacgacaggcagaacaggcgggatccagtctcaatcgacaggtgagcgtggaagatctcgtcagaaccggtgcttttctggtggcgatgtccctgtggcatagccatccgcagaagacaaagatgccgtccatgaatgaagccgttaaacagattgagcaggaagtgcttaccacctggcccacggaggcaatttctcatgctgaaaacgtggtgtaccggctgtctggtatgtatgagtttgttgtgaataatgcccctgaacagacagaggacgccgggcccgcagagcctgtttctgcgggaaagtgttcgacggtgagctgagttttgccctgaaactggcgcgtgagatggggcgacccgactggcgcgccatgcttgccgggatgtcatccacggagtatgccgactggcaccgcttttacagtacccattattttcatgatgttctgctggatatgcacttttccgggctgacgtacaccgtgctcagcctgtttttcagcgatccggatatgcatccgctggatttcagtctgctgaaccggcgcgaggctgacgaagagcctgaagatgatgtgctgatgcagaaagcggcagggcttgccggaggtgtccgctttgtcccggacgggaatgaagttatccctacttccccggatgtggcggacatgacggaggatgacgtaatgctgatgacagtatcagaagggatcgcaggaggagtccggtatggctgaaccggtaggcgatctggtcgttgatttgagtctggatgcggccagatttgacgagcagatggccagagtcaggcgtcatttttccggtacggaaagtgatgcgaaaaaaacagcggcagtcgttgaacagtcgatgaaccggcaggcgctggctgcacagaaagcgggaatttccgtcgggcagtataaagccgccatgcgtatgctgcctgcgcagttcactgacgtggccacgcagcttgcaggcgggcaaagtccgtggctgatcctgctgcaacaggggggtcaggtgaaggactccttcggcgggatgatccccatgttccgggggcttgccggtgcgatcaccctgccgatggtgggggcyacctcgctggcggtggcgaccggtgcgctggcgtatgcctggtatcagggcaactcaaccctgtccgatttcaacaaaacgctggtcctttccggcaatcaggcgggactgacggcagatcgtatgctggtcctgtccagagccgggcaggcggcagggctgacgtttaaccagaccagcgagtcactcagcgcactggttaaggcgggggtaagcggtgaggctcagattgcgtccatcagccagagtgtggcgcgtttctcctctgcatccggcgtggaggtggacaaggtcgctgaagccttcgggaagctgaccacagacccgacgtcggggctgacggcgatggcacgccagttccataacgtgacggcggagcagattgcgtatgttgctcagttgcagcgttccggcgatgaagccggggcattgcaggcggcgaacgaggccgcaacgaaagggtttgatgaccagacccgccgcctgaaagagaacatgggcacgctggagacctgggcagacaggactgcgcgggcattcaaatccatgtgggatgcggtgctggatattggtcgtcctgataccgcgcaggagatgctgattaaggcagaggctgcgtttaagaaagcagacgacatctggaatctgcgcaaggatgattattttgttaacgatgaagcgcgggcgcgttactgggatgatcgtgaaaaggcccgtcttgcgcttgaagccgcccgaaagaaggctgagcagcagactcaacaggacaaaaatgcgcagcagcagagcgataccgaagcgtcacggctgaaatataccgaagaggcgcagaaggcttacgaacggctgcagacgccgctggagaaatataccgcccgtcaggaagaactgaacaaggcactgaaagacgggaaaatcctgcaggcggattacaacacgctgatggcggcggcgaaaaaggattatgaagcgacgctgaaaaagccgaaacagtccggcgtgaaggtgtctgcgggcgatcgtcaggaagacagtgatcatgctgccctgctgacgcttcaggcagaactccggacgctggagaagcatgccggagcaaatgagaaaatcagccagcagcgccgggatttgtggaaggcggagagtcagttcgcggtactggaggaggcggcgcaacgtcgccagctgtctgcacaggagaaatccctgctggcgcataaagatgagacgctggagtacaaacgccagctggctgcacttggcgacaaggttacgtatcaggagcgcctgaacgcgctggcgcagcaggcggataaattcgcacagcagcaacgggcaaaacgggccgccattgatgcgaaaagccgggggctgactgaccggcaggcagaacgggaagccacggaacagcgcctgaaggaacagtatggcgataatccgctggcgctgaataacatcatgtcagagcagaaaaagacctgggcggctgaagaccagcttcgcgggaactggatggcaggcctgaagtccggctggagtgagtgggaagagagcgccacggacagtatgtcgcaggtaaaaagtgcagccacgcagacctttgatggtattgcacagaatatggcggcgatgctgaccggcagtgagcagaactggcgcagcttcacccgttccgtgctgtccatgatgacagaaattctgcttaagcaggcaatggtggggattgtcgggagtatcggcagagccattggcggagctgttggtggcggcgcatccgcgtcaggcggtacagccattcaggccgctgcggcgaaattccattttgcaaccggaggatttacgggaaccggcggcaaatatgagccagcggggattgttcaccgtggtgagtttgtcttcacgaaggaggcaaccagccggattggcgtggggaatctttaccggctgatgcgcggctatgccaccggcggttatgtcggtacaccgggcagcatggcagacagccggtcgcaggcgtccgggacgtttgagcagaataaccatgtggtgattaacaacgacggcacgaacgggcagataggtccggctgctctgaaggcggtgtatgacatggcccgcaagggtgcccgtgatgaaattcagacacagatgcgtgatggtggcctgttctccggaggtggacgatgaagaccttccgctggaaagtgaaacccggtatggatgtggcttcggtcccttctgtaagaaaggtgcgctttggtgatggctattctcagcgagcgcctgccgggctgaatgccaacctgaaaacgtacagcgtgacgctttctgtcccccgtgaggaggccacggtactggagtcgtttctggaagagcacgggggctggaaatcctttctgtggacgccgccttatgagtggcggcagataaaggtgacctgcgcaaaatggtcgtcgcgggtcagtatgttgcgtgttgggttcagcgcagagtttaaacaggtggtgaactgatgcaggatatccggcaggaaacactgaatgaatgcacccgtgcggagcagtcggccagcgtggtgctctgggaaatcgacctgacagaggtcggtggagaacgttattttttctgtaatgagcagaacgaaaaaggtgagccggtcacctggcaggggcgacagtatcagccgtatcccattcaggggagcggttttgaactgaatggcaaaggcaccagtacgcgccccacgctgacggtttctaacctgtacggcatgatcaccgggatggcggaagatctgcagagtctggtcggcggaacggtggtccggcgtaaggtttacgcccgctttctggatgcggtgaacttcgtcaacggaaacagcgaagccgatccggagcaggaggtgatcagccgctggcgcatcgagcagtgcagcgaactgagcgcggtcagtgcctcttttgtactgtccacgccgactgaaacggatggcgctgtttttccgggacgtatcatgctggccaacacctgcacctggacctatcgcggcgatgagtgcggttatagcggtccggcggtcgcggatgaatatgaccagccgacgtccgatatcacgaaggataaatgcagcaaatgcctgagtggctgtaagtttcgcaataatgtcggcaactttggcagcttcctttccattaacaaactttcgcagtaaatcccatgacagagacagaatcagcgattctggcgcacgcccggcgatgtgcgccagcggagtcgtgcggcttcgtggtgagaacgccggaggaggaaagatattttccctgcgtgaatatctccggtgagccggaggagtatttccggatgtcgccggaggactggctgagtgcagaaatgcagggagagattgtggcgctggtccacagccaccccggtggtctgccctggctgagtgaggccgaccggcggctgcaggtacagagtgatttgccgtggtggctggtctgccgggtggcgattcataaattccgctgtgtgccgcatctcaccgggcggcgctttgagcacggggtaacggactgttacacgctgttccgggacgcttaccatctggcgggaattgagatgccggattttcatcgcggggataactggtggcgtcacggtcagaatctctatctggataatctggaggccacagggctgtatcaggtgccgttgtcagcggcgcagccgggcgatgtgctgctgtgctgttttggttcatcggtgccgaatcatgccgccatttactgcggcgayggtgagctgctgcaccatattcctgaacaactgagcaaacgagagaggtataccgacaaatggcagcgacgcacacactccctctggcgtcaccgggcatggcgcgcatctgcctttacggggatttgcaacgatttggccgccgcatcgaccttcgtgtgaaaacgggggctgaagccatccgcgcactggccacacagctcccggtgtttcgtcagaaactgagcgacggctggtatcaggtacggattgccgggcgggacgtcagcacgtccgggttaacggcgcagttacatgagactctgcctgatggcgctgtgattcatattgttcccagagtcgccggggccaagtcaggtggcgtattccagattgtcctgggggctgccgccattgccggatcattctttaccgccggagccacccttgcagcatggggggcagccattggggccggtggtatgaccggcatcctgttttctctcggtgccagtatggtgctcggtggtgtggcgcagatgctggcaccgaaagccagaactccccgtacacagacaacggataacggcaaacagaacacctatttctcctcactggataacatggttgcccagggcaatgttctgccggttctgtacggtgaaatgcgcgtggggtcacgcgtggtttctcaggagatcagcacggcagacgaaggggacggtggtcaggttgtggtgattggtcgctgatgcaaaatgttttatgtgaaaccgcctccgggcggttttatcgtttatggagcatgacgaatgggtaaaggcagcagtaaggggcataccccgcgcgaagcgaaagataacctgaagtccacgcagctgctgagtgtgatcgatgccatcagcgaagggccggttgaaggtccggtggatggattaaaaagcgtgctgctgaacagtacgccggtgctggacagtgaggggaataccaatatatccggcgtcacggtggtgttccgggccggtgagcaggagcagacaccgccggagggatttgaatcctccggctccgagacggtgctcggtacagaagtgaaatatgacacgccgatcacccggaccatcacgtcggcaaacattgaccgtctgcgttttactttcggcgtgcaggcactggtggaaaccacctcaaagggggacaggaatccatcggaagtccgcctgctggttcagatacaacgtaacggtggctgggtgacggaaaaagacatcaccattaagggtaaaaccacttcacagtatctggcctcggtggtggtggataacctgccgccgcgcccgtttaatatccggatgcgcaggatgacgccggacagcaccacagaccagctgcagaacaaaacgctctggtcgtcatacaccgaaattatcgatgtgaaacagtgctacccgaacacggcactggtcggcgtgcaggtggactcggagcagttcggcagccagcaggtgagccgtaattatcatctgcgcgggcgtattctgcaggtgccgtcgaattataacccgcagacgcggcaatacagcggtatctgggacggaacgtttaaaccggcatacagcaacaacccggcctggtgtctgtgggatatgctgacccatccgcgctacggcatggggaaacgtcttggtgcggtggatgtggataaatgggcgctgtatcttatcggccagtactgcgaccagtcagtgccggacggctttggcggcacggagccgcgcatcacctgtaatgcctggctgaccacacagcgtaaggcgtgggatgtgctcagtgatttctgctctgcgatgcgctgtatgccggtatggaacgggcagacgctgacgttcgtgcaggaccgaccgtcggataaggtgtggacctataaccgcagtaatgtggtgatgccggatgatggtgcgccgttccgctacagcttcagcgccctgaaggaccgccataatgccgttgaggtgaactggattgacccgaataacggctgggagacggcgacagagcttgtggaggacacgcaggccattgcccgttacggtcgtaacgtcacgaagatggatgcctttggctgtaccagccgggggcaggcgcaccgcgccgggctgtggctgattaaaacagaactgctggaaacgcagaccgtggacttcagcgtgggtgccgaagggcttcgccatgtaccgggcgatgtcattgaaatctgcgatgatgactatgccggtatccgcaccggcgggcgcgtgctggcggtgaacagccagacccggacgctgacgctcgaccgtgaaatcacgctgccatcctccggtaccacgctgataagcctggttgacggaagtggtaatccggtcagcgtggaggttcagtccgtcaccgacggcgtgaaggtgaaagtgagccgtgttcctgacggcgttgctgaatacagcgtatgggggctgaagctgccgacgttgcgccagcgcctgttccgctgcgtgagtatccgtgagaacgacgacggcacgtatgccatcaccgccgtgcagcatgtaccggaaaaagaggccatcgtggataacggggcgcactttgacggcgaccagagcggcacggtgaatggtgtcacgccgccagcggtgcagcacctgaccgcagaagtcaccgcagacagcggggaataccaggtgctggcgcgctgggacacgccgaaggtggtgaagggcgtgagcttcctgcttcgcctgaccgtggcagcggatgacggccgtgagcggctggtcagcacagcccggacggcggaaaccacataccgcttcacacaactggcgctggggaactacaggctgacagtccgggcagtaaatgcgtgggggcagcagggcgatccggcgtcggtatcgttccggattgccgcaccggcagcrccgtcgcggattgagctgacgccgggctattttcagataaccgccacgccgcatcttgcggtttatgacccgacggtacagtttgagttctggttctcggaaaaacggattgcggatatcaggcaggttgaaaccagcgcgcgttatcttggtacggcactgtactggatagccgccagtatcaatatcaaaccgggccatgattattatttttacgttcgcagtgtgaacaccgttggcaaatcggcattcgtggaggctgtcggtcagccgagtgatgatgcatcaggctatctggattttttcaaaggcgagatagggaaaacccatctggctcaggagctgtggacgcagattgataacggtcagcttgcgcctgacctgactgaaatcaggacgtccataacggatgtcagcaatgaaataacacagaccgtcaataagaaactggaagaccagagtgcagcgatccagcagatacagaaggttcaggttgatacaaataataacctgaacagcatgtgggcagtgaagctgcagcagatgcaggacggacgcctttatattgcgggtatcggtgccggtattgagaacacccctgacggcatgcagagtcaggtgctgctggcagcagacaggattgcgatgattaatcctgcgaatggcaacacaaagccgatgtttgttggtcagggcgatcagatattcatgaatgaagtgttcctgaaacgcctgacggcccccaccattaccagcggcggtaatcctccggcattttccctgacatcagacgggagactgacggcgaaaaatgcggatatcagtggcagtgtgaatgcgaactcaggaacgctcaacaatgtcacgattaaccagaactgtacgattaagggcatgctggaggcgacccaggtcagaggagatttcgttaaagctgtatcaaaagccttcccgaaaaaagtcggtacgtggggtaacacggaaacaccaaacggtacggttacagtcaccatcagcgatgatcataactttgaccgccagattattattccgcccattatttttaacggtatagcgtatgacgatccggggagcggaaataacccaggaggcacgcgatacacgggttatggttttgaagttcgcaaaaacggcgtattaatcgcatccagagaaactaaaggggccattcccggtagttacagtgcagttattgatatgccgagtggcaggggaagcgtcactctggagtttaagattttccagaaaggcaatcagggggcaggcaatatcaccgactgtacggtgattgtgaccaaaaagccgcttccggcatcagtattcgttgaaatatttataaccccaataaagggcgtcaggaatgacgccttttttattgcagaaaagcgagaggtaattatgcgtaaagtttgtgcagcaattttgtccgcagccatttgtctggccgtatccggtgcgcctgcatgggcgtctgaacatcagtccacgctgagcgcggggtatcttcatgcctcgacgaacgtccccggcagtgatgatctgaacgggattaacgtgaaataccgttatgagtttacggacacactggggctggtgacgtcattcagctatgcaggagacaagaatcgccagctgacccgttacagcgatacccgctggcatgaagattccgtgcgtaaccgctggttcagcgtaatggcggggccgtctgtgcgcgtaaatgaatggttcagcgcgtatgcgatggcgggtgtagcttacagccgtgtgtcgactttctccggggattatcttcgcgtaactgacaacaaggggaaaaagcacgatgtgctgaccggaagtgatgacggtcgccacagcaacacgtctctggcgtggggggctggcgtgcagtttaacccgaccgaatccgtggccattgatattgcttatgaaggctccggcagtggtgactggcgcactgacggtttcatcgtgggtgtcggttataaattctgattagccaggtaacacagtgttatgacagcccgccggttcaggcgggcttttttgtggggtgaatatggcagtaaagatttcaggtgtactgaaagacggcacaggaaaaccggtacagaactgcacaatccagctgaaagcaaaacgtaacagcaccacggtggtggtgaacacgctggcctcagaaaatccggatgaagccgggcgttacagcatggacgttgagtacgggcagtacagcgttattctgttggtggagggattcccgccgtcacatgccgggaccatcaccgtgtatgaagattcccgacccggtacgctgaatgattttctcggtgccatgacggaggatgatgcccgtcctgaggcactgcgccgttttgaactgatggtggaagaggtggcgcgtaacgcgtccgcggtggcacagaacacggcagccgcgaagaagtcagccagcgatgccggcacatcagcacgtgaggcggcaacccatgcgactgatgctgcaggctcagcacgtgcagccagcacatcagccgggcaggccgcgacgtcggctcagtcagcgtcttccagcgcaggaacggcatcaacaaaggctactgaagcatcaaaaagtgctgccgctgcagagtcctcaaaaagcgcggcagctaccagtgccggtgcggcgaaaacgtcagaaacgaatgcggcagcgtcacaaaaatctacagccacttctgcatccgcagcgaccacaaaggcgtcagaagctgccacctcagcccgggatgcggcggcctcaaaagaggcagcgaaatcatcagaaacgaacgcatcatcaagcgccagtagtgccgcttcctcggcaacggcggcaggaaattccgcgaaggcggcaaagacgtctgagacgaacgccaggtcttctgaaacggcagcgggacagagtgcctcagctgcggcaggctcaaaaacagcggctgcatcatctgccagtgccgcctcaacaagtgccgggcaggcctcagccagtgccaccgctgccggaaagtcggcagaaagtgccgcctcgtctgcttcaacagccacaacgaaggctggcgaagccactgaacaggccagtgcagcagcgaggtctgcttccgcagcgaagacatccgagacgaacgcgaaagcgtcggaaaccagcgcagaatcctcaaaaacggctgccgcatcgtccgccagttcggcggcttcatcggcatcatcggcgtcagcttcaaaagatgaggcgaccagacaggcgtcagcagcgaagggcagcgccacgacagcatccacgaaggcgacagaggctgctggcagtgcgacagcggcagcacagagcaaaagtacggcagaaaccgcggcaacgcgcgccgagacagcggcaaaacgggcagaggatattgcatccgccgtggcgcttgaggatgcgagcacgacgaaaaaggggatagtccagctcagtagtgcgaccaacagcacttccgagtcacaggcggcaacgccaaaagccgttaaggccgcgtatgacctggctaacgggaaatacaccgcacaggatgcaacgacagcacagaaagggataatccagttaagcagcgcgaccaacagcacgtctgaaacgctggcggcaacgccaaaggcagtaaaagcagccaatgacaatgctgagaaacgtctgcagaaagatcagaacggtgcggatatccctggcaaagacacctttacgaaaaatattggtgcctgccgtgccttcggtgggtcagtaagcacaacaacaggaaactggacgactgcacagtttatcgagtggctggattctcagggagcatttaaccatccctactggatgtgcaaggggtcctggtcttatggcaataataaaatcattactgatactgactgcggtaatattcatctcgccggagctgtcattgaagtaatggggataaagtcagcgatgacgatccgcattaccacaccgaccacctccactggtggtggaacaactaacgcccagtttacctatattaatcacggaacagattattcacctggctggcgaagggactataactccagaaataagccaacggcatcagagatcggggcgttaccgtcaggtggaacagcagtatcatcagttaatctggcttcaaaaggtcgggtaaccgcgctgacagacaatacgcagggggcagcaggtcttgagttatacgaggtgtataacaacggatatccaacagcgtatggaaatatcattcacctgaaagggatgacagccgttggcgaaggtgagttactcatcggctggagtggtacaagcggtgctcatgctccggcatttattcgttcacgacgggatatgaccgacgcaaactggtcgccgtgggcgcagctttacacctcggctcatcctcctgcagagttttatccagtcggtgcaccaatcccgtggccatcagataccgttccgtctggttatgccctgatgcaggggcagacttttgacaaatctgcttacccgaaacttgcagccgcttatccgtcaggcgtgatccctgatatgcgtggctggacgattaagggcaagcccgccagtggtcgtgccgtattgtctcaggaacaggatggcattaaatcgcatacccacagcgccagcgcatccagtacggatttggggacgaaaaccacatcatcttttgattacggcactaaatccacgaataacactggtgcacatacccatagtattagcgggacagcaaatagtgccggtgcgcaccaacacaagagttccggtgcatttggtggcacgaacacgagcatttttcctaatggttatactgcgatttcaaatctaagcgcggggattatgagcacaacaagcggtagtggccagactcgtaatgcagggaagacatcatcagatggtgctcatacccactcgctgtccggcactgctgcaagcgcaggcgcacatgcacatactgtcggtattggtgctcatacgcactccgttgcgattggctcacatggacataccatcaccgttaacgctgcgggtaacgcggaaaacaccgtcaaaaacatcgcatttaactatattgtgaggcttgcataatggcattcagaatgagtgaacaaccacggaccataaaaatttataatctgctggccggaactaatgaatttattggtgaaggtgatgcatatattccgtctcatacaggtctgccagcaaacagtaccgatattgcaccgccggatattccggcaggcttcgtggctgttttcaacagtgatgaggcatcgtggcatctcgttgaagaccatcggggtaaaacggtttatgacgtggcttccggcgacgcgttatttatttctgaactcggtccgttaccggaaaatgttacctggttgtcgccgggaggggaatatcagaagtggaacggcacagcctgggtgaaagatgcagaagcagaaaaactgttccggatccgggaggcggaagaaacaaaaaacagcctgatgcaggtagccagtgagcatattgcgccgcttcaggatgctgcagatctggaaattgcaacggaggaagaaacctcgttgctggaagcctggaagaagtatcgggtgttgctgaaccgtgttaatacaacaactgcaccggatattgaatggccaacagtacccattatcgaatagtgcattacgaactgccaggatattatatggaataatattctgcagtttattggggctgtattttaaaaaggtgtttattttgagtgagttatcaccttgttttttccggttcttttggcttgatataacgctttatcggcattgactaacatttcagatggactgagattattctcttttgaagtaaagcaaccaatactgacagttattttctcaggtccatgcgataataatttttccgagcattgctcttcaatgttttttctgattcgctctgcaattgatagcaagagcttttgagtattacctttaatgataataccgaactcctcaccgcctaagcgccctaatatatcctctttcctgatggatttttttattattctggtaaccattactatgacttgatcacccatatgatgcccccatttgtcattgatgcttttgaaattgtcaatatctaacattattactgagaaatcatggtgttttgatatattcttcaatgagtcaataaagtatcttctattgtatgtattcgttagtggatcatgaattgccatatgattagcatgatttaatttcctgaaaacataatacatgagtgttgaaatgatataaatcattgatatcaattcaagaaattttgtcatgtaccatgcaggatgggattgatcaataaaatacaataaaattagattattgcatactgacactatactaataagtattatacacaaccatatttttgagtaattacgtatgctgatgcatgagctgataagtaatacaagccaaaatactgatattattttggtgtacacggtattccacgtcgacaaatgacgattcagcgagtattgtataatattaagactatattttatattgtcactgcttagattttttgctacaaacggagtaataaaaagaattaatattgacaaaacaacaattattatgtttcttttatcttctaaaacacttttatttttaacattggtggaataaacagccagaaagattatagatataaagctgaactgacggaatagataatatattgcgatatcatttgatttctgatagattgtagataaatcgttacctaacggagataaagaaataatagccacttctaataaataatacgtgttgctcaaaaacgcgaatgaaagaattaagagataactttgtctctgattagaaacatagtaaagcaatagaaaaataaaaatcatcaggtttatgaaaaaaagcccaataatgaaaacactataacttatttgtgttgtttgtgttatgtatattccattattttcatgcagtaacaaaaatataatagagatgcatgaaaataaaaagatgaagatttttatttttataggtacctggttgataatcatgtacgcacctgagaatgatatatatataatatgtatcgctacaaataacgataatttcttactggtgatagtatactattattctggttaatcgctgtcaaactgatgattttggttagtattgcaatagcgaagggtttgatccggtaagactggctaggcaaggctataccaaaaatcagtgtaggttcagaaaacgatgcaccatacaatcatcaataatttcaaattgtccattgtgcataaatcataaagaaaaccgcagcacgtcgtatgcaagaacgtgctgcggttggctggtgaactttcgatagtgcgagtattgaatgatttccagctgttgccgattttactatgttttcagtagaacacttagacaaaactgaggcacacaaatctttgcactggattgcaaggctttgtgcttctctggagtgcgacatgtttgataacaaaaaattagcgcaagaagacaaaaatcaccttgcgctaatgctctgtctcaggtcactaatactatctaagtagttgattcatagtgactggatatgttgtgttttgtagcatcatgtagtctattttttagactaaatatattgtaacacattgatattaatgatttttaatgtttcacgttcagcttttttatactaacttgagcgaaacgggaaggtaaaaagacaaaaagttgtttttaatacctttaagtgataccagatggcattgcgccatctggcagagtgattaactaaacatcgcagtaatcgaggcgcttgccagagagtggaaatgaacgttaaacccgaccatcgcgccgctggcaccttcatcgacatcaatacgttctatatccagcgcgtgaacggtaaaaatgtagcgatgagtttcgcctttcggcggtgctgcgccatcgtacccggttttaccaaagtcggtacgcgtctgcaaaacgccgtctggcattgctaccagaccagagccaaacccttgcggtaatacgcgggtatcagcgggtaagttaacaactacccagtgccaccagccggagccggttggcgcatccgggtcgtagcaggtgacaacaaaacttttcgttcccgcaggaacatcatcccacgccagatgcggtgaaatattatcgccatcgtaacccatgccgttaaagacatgacgatgcggcaatttatcgccatcgcgcagatcgttactgatgagtttcatgaaccctcctttcttgtttgcagaaagtgtagccagaaaccctcacgcggacttctcgttattggcaaaaaaatgtttcatcctgtaccgcgcggttaaccgctgcggtcagacgctgcaactgttgcgggagaataatatagggcggcatcaggtaaatcagtttgccaaaaggccggatccagacaccctgttcgacaaagaatttttgcagcgccgccatattcaccggatgagtggtttcgactacgccgattgccccagcacgcgcacatcggcaaccatttcggcatcacgggcgggggcaagttgctcgcgcagctgtacttcaatagccgccacctgttgctgccagtcgccagattcgagaatcgccaggctggcgtttgctgccgcgcaggccagcggattgcccataaaagttggcccatgcataaagcaaccggcttcgccgttactgatggtttccgcaacctcgcgcgtggtgagcgtggcggaaagggtcattgtgccgccggttaaggctttaccgaggcacaaaatgtccggcgcgatttctgcatgttcacaggcaaacagtttgccggtacgaccaaatccggtggcgatctcgtcggcaatcagcaagataccttcgcgatcgcacattttgcggattcgttttaaccattccggatggtacatgcgcatcccgcctgcgccctggacaatcggttcaatgatcaccgccgcgatttcatgacgatgcgccgccatcaggcgggcaaagccaaccatatcacgttcatcccattcaccatccatgcggctttgcggggcgggagcaaacaagttttctggcagatagcctttccacaggctgtgcattgagttgtccggatcgcacaccgacatcgcgccaaaggtatcgccatgataaccattgcggaaggtcagaaaacgctggcgcgcttcgcctttggcctgccagtactgcaacgccattttcatcgccacttccaccgctacggagccggagtccgcgagaaaaacgcattccagcggttgcggcgtcattgccaccagtttgcggcatagctcgatggcgggcgcatgggtgataccgccaaacatcacatgcgacatagcatcaatttgcgacttcatcgccgcattaagctgcgggtgattatagccgtggatcgccgcccaccaggacgacataccgtcaaccaggcgtctgccgtcagacaaaattagctcgcaaccttcggcgctcgcgaccggataaaccggcagaggggaggtcatggatgtgtatgggtgccagatatggcgttggtcaaaggcaagatcgtccgttgtcataatcgacttgtaaaccaaattgaaaagatttaggtttacaagtctacaccgaattaacaacaaaaaacacgttttggagaagccccatggctcaccgcccacgctggacattgtcgcaagtcacagaattatttgaaaaaccgttgctggatctgctgtttgaagcgcagcaggtgcatcgacagcatttcgatcctcgtcaggtgcaggtcagcactttgctgtcgattaagaccggagcttgtccggaagattgcaaatactgcccgcaaagctcgcgctacaaaaccgggctggaagccgagcggttgatggaagttgaacaggtgctggagtcggcgcgcaaagcgaaagctgcgggatcgacgcgtttctgtatgggcgcggcgtggaagaatccccacgaacgcgatatgccgtacctggaacaaatggtgcagggggtaaaagcgatggggctggaggcgtgtatgacgctgggcacgttgagtgaatctcaggcgcagcgcctcgcgaacgccgggctggattactacaaccacaacctcgacacctcgccggagttttacggcaatatcatcaccacccgcacttatcaggaacgcctcgatacgttggaaaaagtgcgcgatgccgggatcaaagtctgttctggcggcattgtgggcttaggcgaaacggtaaaagatcgcgccggattattgctgcaactggcaaacctgccgacgccgccggaaagcgtgccaatcaacatgctggtgaaggtgaaaggcacgccgcttgccgataacgatgatgtcgatgcctttgattttattcgcaccattgcggtcgcgcggatcatgatgccaacctcttacgtgcgcctttctgccggacgcgagcagatgaacgaacagactcaggcgatgtgctttatggcaggcgcaaactcgattttctacggttgcaaactgctgaccacgccgaatccggaagaagataaagacctgcaactgttccgcaaactggggctaaatccgcagcaaactgccgtgctggcaggggataacgaacaacagcaacgtcttgaacaggcgctgatgaccccggacaccgacgaatattacaacgcggcagcattatgagctggcaggagaaaatcaacgcggcgctcgatgcgcggcgtgctgccgatgccctgcgtcgccgttatccagtggcgcaaggagccggacgctggctggtggcggatgatcgccagtatctgaacttttccagtaacgattatttaggtttaagccatcatccgcaaattatccgtgcctggcagcagggtgcggagcaatttggcgtcggtagcggcggttccggtcacgtcagcggttatagcgttgcgcatcaggcgctggaagaagaattggccgagtggctgggctattcgcgggcactgctatttatctctggttttgccgctaatcaggcggtcattgccgcgatgatggcaaaagaggaccgcattgtcgctgaccggcttagccatgcctcattgctggaggctgccagtttaagcccgtcgcagcttcgccgttttgttcataacgatgtcactcatctggcgcgactgcttgcttccccctgtccggggcagcaactggtggtgacagaaggcgtgttcagcatggacggcgatattgcgccactggcggaaatccagcaggtaacgcaacagcacaatggctggttgatggtcgatgatgcccacggcacgggcgttatcggggagcaggggcgcggcagctgctggctgcaaaaggtaaaaccagaattgctggtggtgacttttggcaaaggatttggcgtcagtggggctgcggtgctttgctcaagtacggtggcggattatctgctgcaattcgcccgccaccttatctacagcaccagtatgccgcccgctcaggcgcaggcattacgtgcgtcactggcggtcattcgccgtgatgagggggatgcacggcgcgaaaaactggtgtcactcattgcgcgttttcgtgccggagtacaggatttgccgtttacgctggctgattcatgcagcgccatccagccattgatcgtcggtgataacagccgtgcgttacaactggcagaaaaactgcgccagcaaggctgctgggtcacggcgattcgcccgccaaccgtacccgctggtactgcgcgactgcgcttaacgctaaccgcagcgcatgaaatgcaggatatcgaccgtctgctggaggtgctgcatggcaacggttaataaacaagccattgcagcggcatttggtcgggcagccgcactctatgagcaacacgcagatctacagcgccagagtgctgacgtcttactggcaatgctcccacagcgtaaatacacccacgtactggacgcgggttgtggacctggctggatgagccgccactggcgggaacgtcacgcgcaggtgacggccttagatctctcgccgccaatgcttgttcaggcacgccagaaggatgccgcagaccattatctggcgggagatatcgaatccctgccgttagcgactgcgacgttcgatcttgcatggagcaatctcgcagtgcagtggtgcggtaatttatccacggcactccgcgagctgtatcgggtggtgcgccccggaggcgtggtggcgtttaccacgctggtgcagggatcgttacccgaactgcatcaggcgtggcaggcggtggacgagcgtccgcatgctaatcgctttttaccgccagatgaaatcgaacagtcgctgaacggcgtgcattatcaacatcatattcagcccatcacactatggtttgatgatgcgctcagtgccatgcgttcgctgaaaggcatcggtgctacgcatcttcatgaagggcgcgacccgcgaatattaacgcgttcgcaattgcagcgattgcaactggcctggccgcaacaacaggggcgatatcctctgacgtatcatctttttttgggagtgattgctcgtgagtaaacgttattttgtcaccggaacggataccgaagtggggaaaaccgtcgccagttgtgcacttttacaagccgcgaaggcagtaggttatcggacggcaggttataaaccggtcgcctctggcagcgaaaagaccccggaaggcttacgtaatagtgacgcgctggcgttacagcacaacagcagcctgcagctggattacgcaacggtaaatccttacaccttcgcagaacccacctcgccgcacatcatcagcgcgcaagagggcaggccgatagaatcattggtaatgagcgccggattacgcgcgcttgaacaacaggctgactgggtgttagtggaaggtgctggcggctggtttacgccgctttctgacactttcacttttgcagattgggtaacacaggaacaactgccggtgatactggtagttggtgtgaaactcggctgtattaatcacgcgatgttgactgcgcaggcaatacaacacgccggactgactctggcgggttgggtggcgaacgatgttacgcctccgggaaaacgtcacgctgaatatatgaccacgctcacccgcatgattcccgcgccgctgctgggagagatcccctggcttgcagaaaatccagaaaatgcggcaaccggaaagtacataaaccttgccttgttgtagctatcctgtatttggttaaattgcgagcgagatcgcgtcttcgattgactgcaatttaaccaattaaattctaaaataatcacgaaaaaaattttacttccgcctcatgcggcgaatgtgggaattgcccaggcggcgggggataggggctggagacagttatccactattcctgtggataaccatgtgtattagagttagaaaacacgaggcaagcgagagaatacgcggcttgcacgcgaattggcgttaaagacggctcaaagaaatatcttttattttttaactggttagataaatgcaatggcagtcactgaacaggcatctcttgccataaaactgtcatcactcatcttgacaaatgttaaaaaagccgttgctttggggataacccggtaaggccggagttttatctcgccacagagtaaattttgctcatgattgacagcggagtttacgctgtaacagaaatattatggtgatgaactgtttttttatccagtataatttgttggcataattaagtacgacgagtaaaattacatacctgcccgcccaactccttcaggtagcgactcatgagtaaaccgttcaaactgaattccgcttttaaaccttctggcgatcagccagaggcgattcgacgtctcgaagaggggctggaagatggcctggcgcaccagacgttacttggcgtgactggctccgggaaaacattcaccattgccaatgtcattgctgaccttcagcgcccaaccatggtacttgcgcccaacaaaacgctggcggcccagctgtatggcgaaatgaaagagttcttcccggaaaacgcggtggaatatttcgtttcctactacgactactatcagccggaagcctatgtaccgagttccgacactttcattgagaaagatgcctcggttaacgaacatattgagcagatgcgtttgtccgccaccaaagcgatgctggagcggcgtgatgtggttgtggtggcgtctgtttccgcgatttatggtctgggcgatcctgatttatatctcaagatgatgctccatctcacggtcggtatgattatcgatcagcgcgcgattctgcgccgactggcggagctgcaatacgctcgtaatgatcaagcattccagcgtggtactttccgcgttcgtggcgaggtgatagatatcttcccggcagaatcggatgacattgcacttcgcgtggaactgtttgacgaggaagtggaacgattgtcgttatttgacccgctgaccgggcagattgtttccactattccacgttttaccatctacccgaaaacgcactacgtcacaccgcgcgagcgcatcgtacaggcgatggaggagatcaaagaagagctggccgccagacgcaaagtgctgttggaaaacaacaaactgctggaagagcagcggctgacccagcgtacccagtttgatctggagatgatgaacgagctgggctactgttcggggattgaaaactactcgcgcttcctctccggtcgtggaccgggtgagccaccgccgacgctgtttgattacctccctgccgatgggctgctggtggtcgatgaatctcatgtcaccattccacaaattggcggcatgtatcgcggtgaccgggcgcgtaaagagacactggtggagtacggcttccgcctgccatcagcgctggataaccgtccgcttaagtttgaagagttcgaagcattagcgccgcaaaccatctatgtttcggcgacgccgggtaattacgagctggaaaaatccggcggcgatgtggtggatcaggtggtgcgtccaaccggattgcttgacccgattatcgaagtgcggccggtggcgacacaggttgatgatcttctttcggagattcgtcagcgagcggcaattaacgaacgcgtactggtcaccacactgaccaagcggatggcggaagatcttaccgaatatctcgaagaacatggcgagcgcgtgcgttatcttcactcagatatcgacaccgtcgaacgtatggagattatccgcgacttgcgtctgggtgagttcgacgtgctggtagggatcaacttactgcgcgaaggtctggatatgccggaagtgtcgctggtggcgatcctcgacgctgacaaagaaggcttcctgcgttccgaacgttcgttgatccagaccattggtcgtgcggcacgtaacgttaacggtaaagcgattctctacggcgataagatcaccccatcaatggcgaaagcgattggcgaaaccgaacgtcgccgtgagaaacagcagaagtacaacgaggaacacggcattacgccgcaaggcttgaacaagaaagtggtcgatatcctggcgctggggcagaacattgccaaaaccaaagcgaagggcagaggaaaatcgcgcccgattgttgagccggataatgtgccgatggatatgtcgccgaaagcgttgcagcagaaaatccatgaactggaagggctgatgatgcaacacgcgcagaatctggagttcgaagaagcggcacaaattcgtgaccagttgcatcagttgcgtgagttgtttattgccgcatcgtaacaggatagcgaagaagactgatgacaaacggaaaacagcctgatgtgctacgcttatcaggcctacatgatctctgcaatacattgaattagcgcggtttgtaggccggataaggcgttcacgccgcatccggcataaacaacgcgcactttgtcttcaataggaagccggaatttttcttcggatttccgttaacctaaagcctgtaacgccttttccagcgcgttatgtaacaactggcggtcatgacgatacggaatatcgctggcctccagtacctcctgaatcacaatccgctctttcaccgccgagacatccacttttggcccgacgatgaccgcatcaatgacctttttaccaacatactgctccataattgccagcttgctttccagcttcaaattagccgcaggtaaactcaactcacgccccagattgccgatataaaccatcggcgctggcgtgcggcgtaatgcctgggcgatttccttcagcagcagaattggcatcaggctggtataaaaactgccaggcccaataatgatgagatccgcttcattgatagcgtgaaccgcctcacgcgttgcgggtacattaggcgttaacaataactcttgaatcggcgtagttaactggtcgatattgacctcgccgtaaacttcatgcccctgatcgtcaatcgccatcagatcgacgggatgctctgacattggaatcaaatgcgtatccactttcagcagattacgaattaaattgatggcttccagaggccgcacgctaaggtgatccagcgcctttaacatcaagtttccgagattatgaccggaaagttcgccattgccaccaaaacggtattcaaacatcgcggaggcgacgctcggttccgttatcagctggttgaggcagttgcgcatatcgccccaggcaatgccgccttctgaacggcgaatacgccccgtcgagccaccattatcggtggtggtgacgatacccgttaaacgagaacccaaagacgaaagtgatgagagaacgcgtcccagtccatgccctccgccgagagcaacgacacgatcaagatcagccagcgtacgattgcgcatatagtttcctggagtcagattatccgcgctacagtagcgcaaattgcggggaaacagcaattaacctgccaatattgaggatacaaactattttcttctacctctaaaggacgatgcacgctatgcctccctgatgatgtatatcaaagtaaaaccgccattttcccttattctgtagcgaaatagcacgatcatgacgctatatacatgattacatagcgaaagtgtggatggtaaaaatctcatttacacgctagtatcggcataaccactaaacactctagcctctgcacctgggtcaactgatacggtgctttggccgtgacaatgctcgtaaagattgccaccagggcgaaggaagaaatgacttcgcctcccgtatctggaaaggtgtacatggcttcacaactgactgatgcatttgcgcgtaagttttactacttgcgcctgtcgattaccgatgtgtgtaactttcgttgcacctactgcctgccggatggctacaaaccgagcggcgtcaccaataaaggctttcttaccgtcgatgaaattcgccgggttacgcgcgccttcgccagtctgggcaccgaaaaagtgcgcctgacaggcggtgagccgtctttacgccgcgactttaccgatatcatcgccgctgtgcgggaaaacgacgctatccgccagattgcggtcaccaccaatggttaccgtctggaacgcgatgtggcgaactggcgcgatgcgggacttactggcattaacgtcagtgtcgacagtctggacgcccgccagtttcacgctattaccgggcaggataaattcaaccaggtcatggcggggattgatgctgcatttgaggccggttttgagaaggtcaaagtcaataccgtgctgatgcgtgatgttaatcatcaccagctcgacacctttctgaactggatccagcatcgccctatccagctgcgtttcatcgaactgatggaaacgggcgagggcagcgagctcttccgtaagcatcacatctctggtcaggttctgcgtgacgagctactgcgtcgcggctggatccaccaattacgtcaacgcagcgacggtcccgcgcaagtcttttgccatccagattacgccggagagattggccttatcatgccgtatgaaaaagacttctgcgccacttgcaaccgcctgcgcgtttcctccattggtaaactccatctctgcctgtttggtgaaggcggcgttaacctgcgcgatctgctggaagacgatacccagcaacaggcgctggaagcgcgtatttcagcggcgctgcgggagaagaaacagacccatttcctgcatcaaaacaacaccggtattacgcaaaacttatcgtacattggcggctaaaacgtcaaaaggagagatcagatgagtcaggtaagcactgaatttatcccgacccgtattgctattcttacggtttctaatcgtcgcggtgaagaagacgatacctccggtcactatctgcgcgattcggcgcaagaagcgggccatcacgttgtcgataaagccattgtgaaagaaaaccgctacgctattcgcgctcaggtatctgcgtggatcgccagcgacgatgtacaagtggtattgattacgggtggtactggcctgacggaaggtgatcaggctcccgaagcattgctgccgttgttcgaccgtgaaattgaaggttttggtgaagtgttccggatgttgtcgtttgaagagattggcacttccacgttgcaatctcgtgcggtagcgggcgtcgccaacaaaacgctgattttcgccatgccgggttcgaccaaagcgtgccgtaccgcatgggaaaatatcatcgcgccgcagctggatgcccgtacgcgtccgtgtaatttccatccacatttgaagaaataagtatgtcgcaactgacccatatcaacgccgctggcgaagcgcacatggtggatgtctccgccaaagcggaaaccgtgcgtgaagcgcgggcggaagcctttgtcaccatgcgcagcgagacgctggcgatgattattgatggtcgccaccacaaaggcgacgtatttgccactgcgcgtattgccggtattcaggcggcaaaacgcacctgggatctgatcccgctctgtcatccgctgatgctcagcaaagttgaagtcaatttacaggccgagccggagcacaatcgggtgcgtatagaaaccttatgccgcctgaccgggaaaaccggtgtcgaaatggaagcattaaccgcggcctccgtggcggcgctgaccatttatgacatgtgcaaagcggtgcaaaaagatatggtgattggtccggtacgtttgctggcgaagagcggcggcaagtcgggtgactttaaggtggaagcggatgattaaagttctttttttcgcccaggtgcgcgagttggtgggaacagatgcaaccgaagtggctgcggatttcccaactgttgaagcgttacgccagcacatggctgcgcagagcgatcgctgggcgctggcgctggaagatggcaaattactggctgccgtcaacaagacgctggtgagttttgaccatccgctgactgacggcgacgaagtagctttcttcccgccggtaaccggaggttaagatggcagaaaccaaaattgttgttggtccgcagccgttcagcgtaggagaagagtacccgtggctggcggagcgtgacgaagacggtgcggtagtcacctttactggtaaggtgcgcaaccataacctgggcgacagcgtcaaagcattaaccctcgaacactatccggggatgactgaaaaagcactggcagaaattgttgatgaagcgcgtaaccgctggccgctggggcgcgtcactgtgattcaccgcatcggggaattatggccgggcgatgaaatcgtttttgtcggtgtcaccagtgcgcatcgcagcagtgcgtttgaagccgggcagtttattatggattatctcaaaacccgcgcaccgttctggaagcgcgaagccacgccggaaggcgaccgctgggttgaagcccgggagagcgatcagcaggcggcaaaacgctggtagttttttgttagccggataaggcaccgctgcgtccggcaatttcaccgctcagtacatgcgtttacgctgcgtcgatgcacagcctcatcattttgcagtatccttaagatattccttatatcttcaggagatcgtcatggacagattcccacgttctgattcaatcgtacaaccccgggctggcttgcaaacttatatggcgcaagtctatggctggatgaccgttggcttgttgctgaccgcatttgttgcctggtatgcggctaattccgcggccgtgatggagctgttgttcactaaccgtgtctttttaatcggtctgatcatcgcgcaattagcattggttattgtgttatcagcgatgattcaaaagctgagcgcaggtgtaacgacgatgctctttatgctttattcggcgctgacgggtcttacgctttccagtatattcattgtctataccgctgcttctatcgccagtactttcgtcgttactgccgggatgttcggcgcaatgagcctgtacggttacaccacgaagcgcgatttaagtggctttggcaatatgctgtttatggcgttaatcggcattgtgctggcatcgctggtcaacttctggttgaaaagcgaagcattgatgtgggcagttacctacatcggcgtgattgtctttgtcggattgacggcgtatgacacgcagaaactgaaaaatatgggtgagcagattgatacccgcgacacgtcgaacctgcgcaaatattccattcttggcgcgttaaccttgtatctggacttcatcaacctgttcctgatgttgttgcggatcttcggcaaccgccgttaaattctcttcttcctgctgatcccggcctggagccgggatttttttcggattttataaagactattccgctcatttacatgagaactgaatcgcggcaaatgccagactatgtccactacgtaatttcagggacagataacgcatttgaacagacaatccactgctactcaattacagcaaaaaagtgcttcgctcagcaaaatgctgcttctcatttggtggttaacagcagctggagtatgggctacggcaggctgtgcctggatatttcagcatttgcattgggttacgtcacaaaagtctccaggtgcttttgtcttcgctttggctgcgctgataataggtggtctctggttaaacaacgccctgaaaagactgaatgtatcaggcgcatgtctggtctatctgctaataatccttcttgttggctttctcttcgccagcctttataccttttcgagcatagcgacggtaatgggaattacgggagggatgtttgccgcaatggcgctgatttgctcttgtagtaatagggttatcccaccagtcagacagttatattcatatattttctgtggtttgagtattgcttttgttgttaacctgatccttaccagcagtttttccgtgtggttagcgagtattttgactgtctttatctggggcattacggctgcctgtgaagcaacaacactggaagatttgatccgtgttgccgacacctctgaaatttcaggttctcttcgctgtatcgttcctggggcaataacactctattttagtattttaagcgtcctctttagaattactgtaacagttcttgaatttattaatggtttagtgtggtagtgcgaattgacgagttttattgcgttaattggaatagataatgatatttaacttaaggatataaaaataatgaattcgcgctcagcaaataacataactaatgattttcagcacgaagccaggatattaaacagcatatggctcattaccgctttaggtttggtgacaaccgcaggactggcctgggtagcgaagtatctcgaaattacggcaacaaaatatgattcaccgcaaatgtatgtcgccataggattattattactttgtatgtatggcttaagtaaggatatcaacaagataaatgccgtcatcgcaggcgtaatatatctatttttactctctttggtggcgattgtcgttgctagtttagctcctgtacctgccattatcgtcgtgttcagcactgcgggcgcgatgtttttaatcagtatgctggccggtttattatttaatgttgatcctggttctcaccgttttatcattatgatgacgttgacagggttggccctggtgatcatcatgaatgccgcattaatgagtgaacgacccgtttgggtaataagttgcttaatgattgtgttatggtcaggcattatctcgcatggacgaaataagctccttgaattggcggggaaatgccatagtgaagagttgtggagtccggttcgttgcgctgttacaggtgcattaacactctattactattttatcggcttctttgggatacttgccgcgatagctataacgcttgtctggcaaaggcatacgcgtttttttcattagtcgtaaatgcagatactaaagaacttaactaaacttcacatcgccgcttcatttttcgcccgtagcttcttcgcctggctttccagtagcaggtaacagatcagcgccagcagcagcgggataaagtaatataggacgcgataagcgagtagggcggcgataattgtgcctttggatgtatgctccccagccagtagtgcgataaacaccgcttccagcacaccgatccccgccggaatatgcacgatgacgccagcaatactactaaccagtaacacgcccagtacaaagaaatagttcacgctttgaccaagtaacagccagataatcgcccccattaccatccagttaacgctggaaatcagcatctgagcgagggcgaatttccatgaaggcagcaccagcttttgccctttgatggtcatatggcggtgcttcgcgaaagcgcaaaaccacaaataaaccgcgataatcatcagtaagccaatgccgagaatacgcagcgtagtttgatcgacataccagtgatccggcaactccaccacgcctgcggtaaagataatccctgccagtaaaatatagcccagccagttggtggtaatactgagcgagaaaatccgcgtaatagtgctgcccggtaaccctagtcgggagtacaaacgatagcgcataccaatgccgccgacccaggtactgagcgtcaggttgaaggcgtagcagataaacgacaccagcatcacctggcgcttcgccagtttgtgaccgcagtaaaagcgggcgagcaggtcatagcagccgtaaatcagatagctgacgaccaccagcccgaccgcactaagcagcgcaacgcgattgtagtcgcggatgaccttccagacctcttcccagtccacttttttggcgtagaccaccagcaacacaatcaccgcgataaaaaacagccaggtgaggatcttctttgctaagcgccagcgcgggtgtgatttactcatcagggttttacccccgtgttttcagtttctacccgatcctgcgtttccattgtcggttgtgcgggcggatcaacctgcgccagacgtggtgtgtgtgccggaagccagccaaccagcgccgggaagtggcgtaaaaagtggaacgccagcacgcttttggtcaggttccaccaggtgcgtttcggcagcatggtctcatcgacctgctgacaatctgcggcaataatgccgttcagattatcgcgcagcgtctggttaaaatgacgatcgtggatgatgacatttgcttcgagattcagtgacaaactgagcggatcgagattactggaccctactgtcgcccagtgatcgtccatcaatgccactttgccgtggagcgggcggcggcggtactcaaatacctgaacgccgcctttaaccagatagttatacagcaagcgcgcaccgactctgacaatcggcatatccggttcgccctgaatgatcagtttgatccgcaccccgcgccgtgccgctttacgcaaggcgtgtaaaaatcgatagccggggaagaagtaggcgttggcgataatgacttctcgccgcgcctgagtgagcattttcagatagtgacgttcaatatcatcgcgatgttcttcgttatcgcgccagaccagcaatacctgcgcttctcccggctggcggttctcttccgctttgtgatgacgtcgccaccagcgtcgtgccgcgctctgtccaggcaggttttccagctcaaactggagaatatcttcgacaatcggcccttcaaggcgtaccgcgtaatcctgtttagcctctggaccgtagctggacatatgctcggcggagtaattcagcccgccaataaaggcgatacgcgcgtcgatcaccacaattttgcgatgcatccggcgaaacacattggtgcgcataccaaaaaggcgagggcggggatcgtagtagcgaaataccacgccagctgccgtcagttcattgacaaactcatcgctgagatccggcgaaccgtagccatccagcaagacttccgctttaaccccgcgttgcgctgctgccagtagtgccgcatgcagctgtttgccgacgtcatcctcaaaccagataaacgtttcaagaatgatgcgttcttgtgcctcgccaatcgccttaaacaccgcgggataatattgctcgccgttttccagcaactggatcttattgccttcgcgccagctacatttcataaatgaatctccgcacttaaaggggcatgatcagaaaggtgtcgccatgtccgcagcggcaacgcggttggcgcgctggcgctggcatttttgacgtagatcctgtccagtcgtagtagaggaaattgcaccggaaacgtgcgcgccgggcgtccgtgggcgcgggtaaaaatctcatccagtccggcctgcacttttaacggatgattagctttttgccgccagtcattgaaatcacccgccaccaataccggttcgccgtccggtagctcattcacccattcggcgagcatcgcaagctgcgcctgacggtgcgcctcacgcaggcccagatgtacgcacatcacatgaatcgcttttccggtcatcggtggcacaatgcggcagtagagcacgccgcgcttttccgcaccatcgaccgaaacatcgcgattctcataatgttcaatgggataacgcgacagtacggcgttgccgtgatgcccttccgggtatacggcattgcgaccgtaggcaaaatcgctccacatcgtgtcggcgagaaactcgtagtgcgaggtatcgggccagttttccacatgcagcggatgaacttcgtgcgcgcccatcacttcctgcaggcaaacaatatcggcgctgacggtacgcaccgcgtcgcgaagttccggcaaaatgaagcgtcggttaaacgcggtaaaacctttgtgaatgttgatggtgagcaccttgaacgaaaattgttgtgtttgatcgggcataattttcctgtctttgcctcttatctcattgaaatagtgtagtcggcgtcacaaaaaggtgcggtcttacggaattttccgtaaagttcggtactctgagtaagtagagataaattcttcaggagagaagccatgaagtggcaacaacgtgttcgtgtcgcaactggtctaagttgctggcagattatgttgcatttactggtagtggcgctgctggtggtgggctggatgagtaagactctggttcacgtcggcgtgggattatgcgcactgtattgtgtcacggtagtgatgatgttggtgtttcagcgccaccccgagcaacgctggcgtgaggtggcagacgtgctggaagagctgaccacgacctggtattttggcgcagcgctgattgtgctgtggctgttgtcccgtgtactggaaaacaactttttgctggcaattgcagggctggcaatccttgccggcccggcggtagtgtctttgctggcgaaagataagaagttacatcaccttacgtctaaacatcgcgtacgccgctgaccctgtcgtggccgttatcaccagtagcggccacaaactattccacacaatatccagactcgcatccttcaaataaatctgcttggtaatgtccgtaaagtggcgaatagggttaatccacgtcaggttttgcagccatactggcatgttttccaccggagaaacgtaaccggaaaggagaatggcgggcatcataaaaacaaacacgccgataaacgcctgctgttgtgtcgagcagagtgatgaaatcaacagaccgaatcccaccagcgataaaccgtaaatcaccatcgtaaagtagaacagcgccagcgatccggcgaaggggatttgatacgcccagataccaatcgccagcacaatggtggcctggaaggtggcgacaattaacgccggtacggctttgccgatgaagatctgccaggtggtgagcggcgaaaccagtagctgatcgagcgtaccttgttcacgttcgcgggcgacggaaagtgaagtgacgatcattacgccgatagtggtgatcatggcgatcagcgacggcaccacaaaccatttgtagtcaagattcgggttataccagttgcgtaccaccagctcgctgttgttaggtttcggttttccttccagcagctcctgctgataatttttgacgatctgttgcaggtagttggcggcaatttgcgcactgttggagttacgcccgtcgaggatcaactgcaacggcgcggtctggaaggtatccagtttgcgcgagaagtcagccgggaaacgcaccagtagtaacgccttttgtgtgtcgatggttgggcggatctcctgtgggcttttcagcagcagcacatgagtaaaggcgctggcgcgggcaaaacgttgggtcagctccaccgaatgctcgccgttatcttcatcgtagatggcgatggtggcgttagtcacttccagcgtggcggcgaacgggaacagaatcacctgaataagcacaggtaaaatcagaatcgcgcgggtttgcggttcgcgcagcagcgactgcaactctttgcggattaacgtccataagcgatgaaacatgctcttctccctaatccagccgacgtttggttttcagccacgtcaggccgataaacatcaccgccgaagcgatcaaaaacagcacgtttaccaccagcaccactggaatattcccggcgaggaacaggctttgcagggtgctgacgaaataacgagcgggaataatgtacgtcaccgcgcggatcaccgcgggcatactgtcgatctgaaaaataaagccggaaagcataatcgacggcaggaaagcggcgttcagggcgacctgagcggcattgaactggttgcgggtaatcgtggaaatcagcagccccatccccagggtactgagtaaaaacaggctggagataaaaaacagaatcagcagcgacccgcgatacggcacgccgagaataaacactgacaccagcatacacagcaacatcgccagcatcccgagaaagtaataagggatcagcttacacagcagcagttccgtgcgggtaatctccgtagagagcagagcctccatggtgccgcgttcccattctcgcgccaccaccagcgaggtgagaatcgcgccgatgaccgtcatgataatggtcaccgcaccggggataatgaagtgctggctaatcgccgccgggttaaaccagtagcgggtttgtacatcaataagcggttcaaaagtctgcccgttgtcctccgctcgctgcatttgccagatctgccagatcccttcgacatacccctgtacaaagttagcggtattcggctcactgccgtcggtgatcacctgaatcggtgcggtggcgttggcgcgctccatctgttccgcaaaatccaccggaataaccaccagaccgcgaattttccccgcctgcattttggcgatcagttcctgacggttatcgctgatggtggcgtcgatgtagggcgaaccggtcatggtgtgggtgaaatccagcgccgcttcgctacgctgttccagtaaaatcccgacccgcagcttgctggagtcgaggttaatgccgtaaccaaaaataaacagcagtagcagcgggatcactaccgcaatcagccagctactcggatcgcgaacgatctgccgcgtctctttaacgcacagcgcccgtacgcgacgccaggacaggatcgggttactcattgctatgctccttatcccagtcgtggatcaactgaataaaggcttgctccatggtgggatcgggttgctcgtcgttggccgactgcgctttcaaatcatccggcgtgccgctggcaattaatttcccacggtacaccaggccgatgcggtcgcaatattctgcttcatccataaagtgggtggtgaccatcaccgtgacgcctttctctaccatgctgttgatatgtagccagaattcgcggcgagtaatcggatcaacgccggacgtcggttcgtcgagaaacagaatgtccggttcatgcatcagcgagcaggccagtgccagccgctgtttaaaacctaatggcagttcatcggtggcgtgggaggcgatacttttcaggccgaacgcctcgctcatacgggagattttttcgttctgcgcccgaccgcgtaagccatacacaccagagaaaaagcgtaaattctgttcgaccgtcaggttaccgtagagcgaaaacttttgcgccatatagccgagatgctggcgcgctttaccagaactctctttcagatccatccccagcaccagcgcctggccggaagtcggcaccagcaaaccgcacatcatcttaaaggtggtcgatttacccgcgccgtttggccccagcaaaccaaaaatctccccacgtttaacggcaaagttgacgtgatcggtggcggcaaaatcaccaaatttcttggtcagttctttcgcttcgatcaccgtctcgccgggtgtgccttctaccgtatgtaatattgcgcccagcggcgattctgaggttccggcaccacccagcaaatcaataaatgcatcttcaaaacgcggcgtagtttcgttgatgttgatttccggcatcccgtcggcatggcgaatatcgtctggtgtggcctcttttttgaggatcagacgtaccgatttcccctgaatcatgccgtcgctgacctgtggcagtttcaaggcgcgttgcaatagtttgcggttgccctcgtgtggactggtcatcagaaaactgcgtccggccatggtttgtgtcagggcttttggttccccctgatacagcaactcgccttcgttcatcagtaacacgtcacggcactgctcggcttcgtcgagatacgaggtactccagaggattaacatcccttcgcctgccagctcatgcaccatctgccacagttcgcgccgtgagatagggtcaacgccgacgccgggttcatcgagcagcaacactttcggttcgcccaccagggtacaggccagaccgagtttttgtttcatcccaccggagagcttgcccgccaggcgtccggtaaacggcccaagagacgtaaactccagcaggcgagcaaaagtttgcttacgtgcctcgccggtgacgctgcgcaaatccgcgtacagattgaggttctccatcaccgtgagatcttcatacagaccaaatttctgcggcatatagccgagcacggcgtgcagcgcgccgtcgtttttgattggatcaaagccaatcaccgtggcattgccgctgtcgggtttcagtaatcccgccagcatccgcattagcgtggttttacctgcaccatccggccccaccagccccgtcacataaccggcgtgaatggtacaatcgagcggcgcgacggcgggcttgtccatgcccggaaagcgtttttccaggccgttcagcgtgataacggcatcattcatgtcctgcctcgttaccgaattgcaccgtcaccggcattccctggcgtaacgcatcatcggcgtcggtcaccacaatacgcaggcgatagacgaggtcggtacgcagatccggtgtttcgacggttttcggggtaaattcagcagtcggcgaaacgaaaccaatctgcccgtgatagggcttgtccgggcgaccatcggtataaagcagcactttgcgccccggctgggcctggtcaagattacgttcgtcaacataggcacgtacccacaccggacgcgttagtgaaacggtaaacaccgtgccaccttcattgagaaccgtgcctggctccaccgcgcgcgttaacagcgtgccatcagacggggctatcaacgttgagtcctgcaaattcaactccgcctgcgccagttgcgcctgcgcctgttcgaggctggctttcgcctgggcgatgtcctgttcacggttaccggaacggtactgacgcaatttatcctgtgctgatttcagcgttgcctgcgcctggtcgcgcgaggagcgggcattttccaggtcgtttgccgaaatggtgcggcttttccacaacccttgctggcggttatagaagttctgcgcatagtcataggcggcttgcgcctgtttcaccgctgcggcggcctgagcgatttcttcatcgcgatacccggcaagcatcaggtcatactgcgcctgtgccaccgagacgcccgctttcgcctgcatcagggcaatctcatacggcttgtgatccagttcgcccagcacctggcccgctttgatcgcatcaccttcgtccaccgccagcgattcaacgcgccccccaacacggaaactaagatttaccgtacgaatatccacgttgccatacagcgtcaggccgttatcctggcggctttgataccaccagtagcctccggcaaccacggcggcaagtaccactaccgccaatccgatcacgacaggttttttcatcactacaaactcctttgcgataatccttgcaaaatcaggtcgatatgacaggtcaccgtctggttgatcagttcggtcttttcttcatcgaacgcggtccagccggtacgtaacagaattgtttctttgccaagacggaacgccagaatctcaccaatcaacgcatgagtatggaggatcatgcgggtatcgttggcgtcgcagccggtccaggcggcaatcaggcgtgtcaggtggctgtgtagcgggctaatcacctgttcgtgcaccaggtgataggctgccgtgggagagagctgctcacgggagataaacttgctgaggttgacggtgtcatcctgggtgagcagcttaatcatgttcctgcaggcgcgaaggatcagttcacggatggctgcgcgatcaggctgtggttgtgcgaacaagcgttcggcctcttcggcgtgcggacggaactgctcgccaataaaatcggcaatccactgggcgcaggcgaggtacaaatcttctttcgaaccgaagtagtaggtgatggcagcgatattctgcccggcctgggcggctatctcgcgggtggtggcgttcattccatattcaccaaactgcgccagtgcggcagcaatcagctgttttttcgcctgttcacccttgattgtcatggcaggattattcatcgcacagtccattcttaatcaaatgattgattaagattatgactccatatgggagttgtccagtatggctaagaattttagctacgccagtcacagggataatttatgcgctgcgtcacaaaaactgctacactccgctccctcatgacattgtggtttttgtcattttccttttcagtatctccctgaaaactacaccggtaacggtcggggcggttcggagtagttatgtctttcgattctttgggtttaagccctgatatcctgcgcgccgttgccgagcagggttaccgtgaacccacccctattcagcagcaggcgatccctgcggtgctggaaggccgcgacctgatggctagcgcccagaccggtaccggtaaaacagcgggctttacgctgccgctgttgcaacacctgatcactcgccagccgcacgccaaagggcgtcgtccggtacgtgcgctcattcttaccccgacccgtgaactggctgcgcagattggcgaaaacgtccgtgattacagcaaatatttgaacattcgttcgctggtggtgtttggcggtgtcagcattaacccgcaaatgatgaagctgcgcggcggcgttgatgttctggtggcaacaccgggacgtttgctggacctggaacatcaaaatgcagtgaagctggatcaggttgaaatcctcgtcctcgatgaagctgaccgcatgctcgacatgggctttatccacgatatccgtcgcgtgttaacaaaactgccagcgaaacgccagaacctgctgttctctgcgaccttctctgacgatattaaagccctggcggaaaaactgttgcacaacccgctggaaatcgaagtggcacgccgcaataccgcgtctgatcaggtgacccagcacgttcactttgtcgataagaaacgcaaacgcgaattgctgtcgcacatgattggtaaagggaactggcagcaggtgctggtgtttacccgtaccaaacacggcgctaaccatctggctgagcagctcaataaagatggcatccgtagtgcggcgatccacgggaataaatcgcaaggtgcgcgtacccgtgcgctggctgattttaaatcgggtgacattcgcgtactggtggcgaccgatatcgctgcgcgcggtctggatatcgaagagttgccgcacgtcgtcaactatgaactgccaaacgtaccggaagattatgtccaccgtatcgggcgtaccggtcgtgcggctgctaccggtgaagcgttgtcgttggtgtgtgttgatgaacacaaactgctgcgtgatatcgaaaaactgctgaaaaaagagatcccgcgcattgcgattccgggctatgagccggacccgtcaatcaaagccgaaccgatccagaacggtcgccagcaacgtggcggcggcggtcgtgggcaaggtggtggtcgcggtcaacagcaaccacgccgtggggaaggtggcgcaaaatctgcaagcgcgaaacctgcagaaaaaccgtctcgccgcctcggcgatgccaaaccggcaggcgaacaacaacgtcgccgccgtccgcgtaaacctgctgctgcgcagtaatctttaatgccgggctatgcccggcatcaggctgatgaacaaacgcaaaactgcctgatgcgctacgcttatcaggcctacgtgaactctgcaatatattgaatttgcatacttttgtaggccggataaggcgtttacgccgcatccggcatttcacaacaagcacttgtcagcaatttgagaacacgggaaaaaatttatctgttttaccgcccataagccaccgagacgttacttctctatagccaattgttcgcgcaactccattaaaaggtagcccagtcgattcttgcccttaccattaccaccgtctccccagtaagcatcgttttccgtatgctcaaccagttttgcgggcgcggttgccagcaagagcgcacgcagttctggatgctgttcgaatttagcgcgaagtgcttttcgcatcacctgttctttgaccgactcccagtttttacgcagaggcttagaacgatcgcgccccatgcgtgcggcgaccataggggaagaaacccgacggatctcttcgcggtatttttcatcaaggaatttttgtgcctgaaaatagtgttctgaggtgggccaggttttcccgtcaaccttgatgggccaggcggcaaagttagaaaaatcaccgtagtcatcgctggtgctgtagaaatttatgatggtgtcttgcatgacgtgttggatcctttgtgctcgaacgggcattaaaccgcattatgttggtggttattgcgagccgctttccagaaacagaaaaaccattacccctgaaaaccgaaaaatgccacaatattggctgtttatacagtatttcaggttttctcatggcattaaccgccgcgcttaaagcgcaaattgccgcctggtataaggcgcttcaggaacagatccccgactttattccccgtgcgccgcagcggcagatgattgcggacgtcgccaaaacgctggccggagaagaagggcggcatctggcgattgaagcccccaccggcgttgggaaaacgctctcttatttgattcccggcatcgccattgcccgcgaagagcaaaaaacgctggtggtgagtaccgccaacgtggcgttgcaggatcagatttacagcaaagatttaccgctgctgaaaaagatcattcccgatcttaaattcactgccgcttttgggcgtgggcgctacgtttgcccgcgtaatctgacggcgctcgccagcactgagcccacgcaacaggatctgctggcgtttcttgacgacgaactgacgccaaataatcaggaagagcaaaaacgttgtgcgaagctgaagggcgatctcgacacttataaatgggatggtctgcgcgatcatactgatatcgctatagatgacgatctctggcgtcgtttaagtaccgacaaagccagctgcctcaaccgcaactgttactactatcgtgaatgcccgttttttgttgctcgtcgggagattcaggaagcggaagtggtggtggcaaaccatgcgctggtgatggcggcgatggaaagcgaagccgtactacctgacccgaaaaatctgctgctggtgctggacgaaggtcatcacctgccagatgtggcccgggatgcgctggagatgagtgccgaaatcaccgcgccctggtatcgactacagctggacttgttcacgaaactggtcgctacctgcatggagcagtttcgcccgaagaccatcccaccgctggcgatccctgaacgtttgaatgcgcattgtgaagagttgtatgagcttatcgcctcgttaaacaacattctcaatctctacatgcctgccgggcaggaggcagagcaccgttttgcgatgggcgaactgcctgatgaagtgctggagatctgccagcggctggcaaaactcaccgagatgctgcgtggtctggcggagttatttcttaacgatttaagtgagaaaaccggcagccacgatattgtgcgtctgcatcggttgattttgcagatgaaccgcgcgttggggatgttcgaggcgcaaagcaaactctggcggctggcgtctctggcgcaatcttccggtgcgccggtgaccaaatgggcgacgcgggaagagcgcgaagggcagctgcatctctggtttcactgcgtggggatacgtgtcagcgatcagctggaaaggctgctgtggcgcagtattccgcacattattgttacctccgcaaccttgcgttcgctgaatagtttttcgcgtttgcaggagatgagtggtctgaaagagaaagcgggcgaccgttttgtggcgctggattccccctttaaccactgcgaacagggcaaaattgttattccccggatgcgcgttgagccttccatcgacaacgaagagcagcatattgccgaaatggcggcctttttccgtaagcaggtggagagcaaaaaacatctcggtatgttggtactgtttgccagcggacgggcgatgcagcgctttctcgactatgtgacggatttacgcctgatgctgctggtgcagggcgatcagccgcgttatcgcttagttgaactgcaccgcaaacgcgttgccaacggtgagcgtagtgtgctggtgggcttacagtcatttgccgaagggcttgatttgaaaggtgatctgctcagccaggtgcatatccacaaaatcgcttttccgcccatcgacagcccggtggtgatcaccgaaggggaatggctgaaaagcctcaaccgctatccgtttgaggtgcaaagcctgccgagcgcctcgtttaacctgattcagcaggttgggcgactgattcgaagccacggttgctggggcgaagtggttatctacgacaaacgcttgctgaccaaaaattatggcaagcgactactggatgcattaccggtatttccgatagagcaaccggaagtccctgaaggtatagttaaaaagaaagaaaaaacgaaatccccacgccgtcggcggcgttaatgatgtgagtcaggtaaggagtcgtaaatggactatcgcaaaatcattaaagagatcgggcgcgggaaaaaccacgcgcgcgatttagaccgggatactgcgcgcggtctgtatgcccatatgctcaatggtgaagtccctgaccttgagttgggcggcgtattgattgcgctacgtatcaaaggggaaggggaagcagagatgctcggcttttacgaagccatgcaaaatcacaccatcaagctgacgccgcctgcaggcaagccgatgccgattgtcatccccagttacaacggcgcgcgtaaacaggccaacctgacgccgttgttggcgattctcctgcacaaactcggttttcctgtggtggttcacggggttagcgaagatccaacccgcgtgctgactgaaaccatttttgaattgatgggtattacgccaacgttgcacggcgggcaggcgcaggcgaagctcgacgaacatcaaccggtgtttatgccagtcggcgcgttttgcccgccgctggaaaaacaactggcgatgcgctggcggatgggcgtgcgtaacagtgcacataccctggcgaaactggcgacgccatttgccgaaggtgaggcgctgcgtctttccagcgtttcgcatccggaatacattggacgcgtcgcgaagttctttagcgatatcggcgggcgggcgctactaatgcatggtactgaaggtgaagtgtatgctaatccgcagcgctgcccgcagatcaatctcattgaccgtgaagggatgcgggtgctgtatgaaaaacaggaccctgctggtagcgagttactgccacaagcaaaagatccggaaaccacggcgcagtggattgagcgttgccttgctggcagcgaaccgattcccgaatcgctgaaaatccagatggcttgctgcctggtggctacgggtgaagcggcaactatcagcgacggcctggcgcgcgttaatcaggcattttaattcttttctcagccggatgagccatgtcatccggcttttaccccaccgcaatatgaaattcctgcatctttattgaccttcccgcgcccggcgtgcagcataaaaaaacaacaaacacataacataaacaggagttaaccatggaaagtggtcatcgctttgatgctcagacgctgcacagttttattcaggctgtatttcgtcagatgggtagcgaggaacaagaagcgaaattagtggccgatcatttaatcgcggcaaacctggcagggcatgattctcatggtattggcatgatcccaagctatgtgcgttcctggagtcaggggcatctgcaaattaaccatcatgccaaaatcgttaaagaggcgggggcggcagtcacgctcgatggcgatcgcgcattcggtcaggtcgcggcacacgaagcgatggcgctggggattgagaaagcgcatcagcacggtattgctgccgtggcgctacataactcgcatcatatcggccgtatcggttactgggcggagcagtgtgcagcggcggggtttgtctctatccactttgttagcgtggtcggtattccaatggtcgcaccgttccacggtcgcgacagccgctttggcaccaatccgttctgtgtggttttccctcgtaaagataatttcccgctgttgcttgattacgccaccagcgccattgcatttggcaaaacccgcgtcgcctggcataaaggcgtccccgtgccgccaggttgcctgattgacgttaacggcgtgccgacgaccaatccggcggtaatgcaggagtcgccgttgggttcgctgttgacctttgccgaacataaaggctacgcccttgcagcgatgtgtgaaattcttggcggggcgctttccggcggtaaaacgacgcatcaggaaacgttacaaaccagtcccgatgccattcttaactgcatgaccactatcatcatcaacccggaactcttcggcgcgccggattgtagcgcgcagaccgaagcctttgccgagtgggtgaaagcctcgccgcatgatgatgataagccgattttgctaccgggcgagtgggaagtgaacacgcgtcgcgaacggcaggagcaggggattccattggatgcgggaagctggcaggccatttgtgatgcggcgcggcagattggtatgtcggaagagacgttgcaggctttctgtcagcagttagccagctaaaaaaaagcccgtccagtggcggacgggcaaacaagggtaacataggatcaatgagggttagagcatatgcgtctgtcggcaaacagacagggaaatacttgtgctggacgtagcgtaaacgcctgatccgtccaacggttcggattttgtaggcctgataagacgcggtagcgtcgcatcaggcatctgttgccggatgcggcgtaaacgccttatccgtcctacgaattacttataaattaccgcagtaccgcttaatttattgttgttggtggcggaagtgatgctgtatccactggcaccggctgccgcggctttctcagccagtttcgcttccagggcatcgagggtggatgcgccatcggcagaaaccacgccgattttattcatgttctgtgcctgggatgccgttaccggttccgcggcaaacacgccaaatgacagagttgaaagagccatagcagcaacaacagtattgatagttttcataattaatctctcgcaggtgatttttgtataagtgacgttgtttcgtcgatgtgatgagtatcacgtttttttacgagagataaaatcgaagagaattgaccgccttgttcaaataaattgattgatatctaacatactgataaaccatttatttgttgtacttatggacttgttttatgccgcgtggcagtcacagcagcgttaaaggcacggaatgccacgcaaaatacaaattatactcgctatgcatctcgccagttgtagttaacgtaactggctgtctttcgaacctctgcgattatatcctgtatacgctggtttttgtaaatctttctcctgctgacaatgaatacataagcgcacgccaggaatggcttcccgacgggcttgcgggatgggggcaccgcactcttcacattcatccaggctttcgccacgcggaatttcaccccgagcgcgggcaatcgcatcttcaattgtactgttgatctgttcgttgacggcgtcatcgttagcccaaccggatgccatatcgtcctccccatatcaatgcttgtacagttaagtgtagctaatccagggacgaacctgggcagttcaagcatcagatctccgaccattcccgcagcagattatgataaagattaagcagcgacaggatctcttcactttcgccgtagcggcttttcagcgactgaatattgttgtccagttcaaacagcatggcgcgctttttatcatcacggatcatcgactggatccacataaatgatgccactcgtacgccgcgggttacgggtgtcacgcaatgcaggctgctggagggatacaacacgagatcgcctgccgggagttttacccgatgttgtccgaaggtgtcattaacgaccagttcgccgccgtcgtagctttgtggatcgcttaaaaacagcgtggcagaaaggtcagtacgcatccagccgttttgtggatggctgcgtactgcgccatccacatggaaaccataggtttcattgttctgatagcgattaaacagcggcgtggaaagggtacgcggcaaggccgcggcaaagaacaaagcattttggttaaccgcgttcagcacctcattttgcagggcggcgtataacgtgctgcgggtgtcgacctgttgattgttcttaacttgcgcaccttgtgcgccggtggtgatgcgtccatccacccattcggcttgttccagttgttcgcgaaaccgggcgacgtcctgtggcgataacacgccgggaatgtggtacatcatacaagttctccaaaaagtggggcctgcgccccacatctgaatcagaaatgcatattggctgtgagcaagaaggttcttggctcgcccgggtgataacggtagccgctcttgttgattgaggcgacgtaatcggtatcaaacaggttgtaaacgtttagctggaagtcgagattgcgattaacccgataccccagtttggcatcggcgacccagtaaccttcggtaaacgctggcgttcccaccgcgccgtctgaacctttatgcatactgccgatatagcgtgcgcccgcgccaacagagatatcatctgttgcctgatactggctccataaggtgaaggcgtgctccggggtatacggcagcgatgaggaaccatcctgggcaacatctttgccgtttttgatggttgctttttgctgggtatagccgccaatcacctgccacgcgggagtgatattcccggccacggatatctcatagccttcgacacgtttcttaccgtattgcgagtaagttccgtcatcattttgctcaacttcattttcgatatcagtacggaacagcgcggcggtgagcaacaggcgtttatccagaacctgccatttggtgccaatctcgctggtgttggctttttgcggtttaaaatcggtgcggttggcactgttaccgctgccagactgcgcaagggcgaagttgttgccgcccggaggctgctgggaaacggcatagttaatatagacattaccgttttccgtcaggtgatacagcgccccggctttccagttcaccagattgcccgacttggcggtgtcgacggtggtgaccggagaaccttttgccacaccagttgggcaggtgatggcaccgcgtccgctgccgccgcaggcggtggcactgtcatattcagtatgataattatccagacggatcccgccgttcagctcaaaatcacgggtgatttgcagcgtatcgaaggcgtaaattgcgaaggtatccgtctgaccattggcgtttgcgccgttgcgcgtcaggccgccgggatgaatgctgctgtcaggatgataaatatttaccgcgggtaacgtcaccggattaacgccgtagttagtctgcgtttcacgggtaaattccacgccggtactgacatcatgaccgatagaaccggtatagaacgtcgaggtcaggttggtctggttggtgagaattttattactcacatctttggtattcgccgtgcgtgaccaggtccagctattcacatcgctggtgggctgagtaatattcgacgccccgcccataatcgccgtcatcaggtaatcctgctttacgcgcgaccaacgggtagtattgcgaatggtggtgttatcgttgatgtcgtgctcaaaacgcatggtggcggtgtcggtggtcgaatcgtcgtaatcggaatccgtgccgtaaaagttatgagtatcaacttttccggaatgattcagagccgctgttcccgcagatggggcagaataacccggcaaaccgatggtcggaatgccgccgtctggcgtgttgtgctgggtgacatgcagataattaagatacaaacgattcgctgtaccaaggccaaaagcgatagaaggggcgacgccgtaacgctcatttttgactttgtcgcgtccggcatcgtgcgttttttcgcccatcacattcaggcgcaccgcagtggtatcaccaatgacctgattgacgtccagcgtgccgcggcggaaccaggcgctgccaatactggcggaggcgtcaatgccggaatcattgcgcggctgcttgctgatcatattgatcgagcccgtcggcgcgctgcgcccgtagtcggtgccggaaggccctttaatcacttcgacctgctcagtattgaaggtgtcgcgcgagacgctgccgatatcgcgaatgccatcaatataaatactgttagaggtatcagcaccgcgcatataaatggcgtcgccagtggtggagttaccgttctcacccgcaaaaaacgcacccacgccggggacgtttttgagcgcgtcggtaaggttggttgcgccctgatctttaatcacttgttcagaaatcaccgtcatcgtgcgggtagtatccgctaccggacgcgagaatttcggatcggcagattgttgtggcgcataaagcgaaggcgttgatgcttcgacaaccagcgtgtcatccgcgttagtttgcccttcggcggcgagtgcctgagccacaggcgtgatgccaatacaaagaccggcaaagaacgtgagcgaatgaaattgtctggcagggaaattgcgattgttttccattttgcaggtgacttttttttatatgttgaaattttcactgccacgagaaagcctctctgcggatgcgatgccactgttaatctcgtgatagcgttcgtgcaagtgataataattttgataagcattatcacttggcgcgattttctatcacccattgcgcgaaaaagaaatacatttatttacattgcgttcatatttgatgttttttgattacaaaacaggcgaaaactgcatccagaggcgaatgcagttacgttggtggggttatttgtagatggttgcagtaccgaacatctggtcatttccgcctgcggaattaatgacataacctttcgcgccttgctcgcgcgctttttctgccagtttatcctccagatcgcttaggtttgatgcgccagttgccgaaacggtaccggcgggccgtagctgaccgctgtccaggttactcatcggttgcgcggcataagtcgtgagagagattccgctcaggacggtggcaatcagtagtgtgaggcactttttcataatgacatcctcataaatacaacgggtagtgcctgataagtgtaggtcgcctgggcgatgaaaatgacgcaaaaaattgacagagatgtgcttattttttgaacgatatatttttacaaaataagacaaatcaatgacatgcataatgctgatttttatgatgaattgccataaaccatagccatgttaaggttttggggaatgataaacgcagccagatatttaccctgtcgcgttatgcgggtatcttacgccgctgcttaaaggagaatgctatgtccgcccagaaaccggggttgcatccgcgcaaccgtcatcacagccgctacgatctcgccacgctttgtcagatcaatcctgaactcaggcaattcctcacgcttacacccgcaggggagcaaagcgtagactttgccaatccgctggcggtgaaggcgctcaataaggcattgctggcccatttttacgccgtagcgaactgggatatcccggacggttttctctgcccgccagtaccgggccgggcggattatattcatcaccttgccgatttactggcagaagcaagcggaacaattccagctaatgccagcattctggatatcggcgttggtgcgaactgtatttatccgctgattggcgtacatgaatatggctggcgttttaccggtagtgaaaccagcagtcaggcgttaagtagtgcgcaggcgatcatcagtgctaatccggggcttaaccgcgccattcgtctgcgtcggcaaaaagagagtggggcgatttttaacggcatcatccataaaaacgagcaatacgacgcgaccttgtgtaacccgccattccacgattccgccgctgcggcacgggcaggtagtgagcgtaaacgccgtaacctggggctgaacaaagacgatgcactgaactttggcggccagcaacaggagttgtggtgtgaaggtggtgaagtcgcctttatcaaaaagatgattgaagagagcaaaggcttcgcgaagcaggtgatgtggtttacctcgctggtttctcgtggtgaaaacttaccgccgttgtatcgtgctctgacggacgtgggcgcggtgaaggtggttaaaaaagagatggcccaggggcaaaagcagagtcgctttattgcctggacctttatgaacgacgagcagcgccgccgttttgttaatcgccaacgttaaagcgttggctcccccggcggcagcggttcagccggggccgcgcccggagcaggcagcacctgataagtctgcactggcgcgcgaacacctgccaggtcgaaatgctttttcacctggctgtcgagggcaaagcggaccgtccactgtttgagtggcagcgtggtgaacgaaacacgcagtgtaaacgcggtattgcttaagccgacaatcccggcaaagtttggttcaccaataaccagcccgcgaatttcttcgttttccatcaattccgctaccgcatctttcagtgcctgattggctttatcagcatcttcatggcgatcaacatcgtagtttgccaccaccgaaccaatgccgcggacgaagttagcaaaggtggttatcgaagaccaaggaatgatgtgatacgccccggtatcctgacgcacgcccacggagcgaatcgacatccgttccacagtgccggtcaacggcccgatagtaaccaaatctccagtgttcatgccgttttcaaactgaataaataccccggtgataatatctttcaccagcgtttgcgaaccaaacgagatagccagacctaatgccccagcacctgccagcaatggcgcgatattgacgccgatttccgacaacacaatcatgatggtgatggtactgataatcaccgccagcgcgttacggaacagcgtcagcagggtacgcgtacgggcgctgggtagcgggcggccatgaatatccgaagccagccggttttcgatcaaactggcgagcactgtccagccaaccgccgagaagaaaagaatgagtgcgatgcggatcaggatatctacggttttctgccccgcgccgttttgcagccagttccagaaatcgaacaatccccatgcgctcaatagcaacattaccgccacgcagacggtcagaatacgcgccgttttcagcgccgccgaaagccagccattcagccgtttttgtagctccggatagttacgctgagtatgtggcgagagggtgatggttttcgccagccagcgggaaaacataccggaaacaaacgctgcgataccaataatcgccaggctgcgcaccgttgcacccatcataaatttcaggctgttgcccggatcgaacaacgaaaagaaaaacagcacgataaaataggcgcttgccagccagtgccacaccagcgcaaaggcgcggataaacaggctgaaaaaggccagcgaatgctccgcaaagttgagcaaatgttgggtaatctcttttttattgcgaaagatcaggtacaacgcccagacggtcatgcacagcataatgatgatgttcgccagcgcacctatctgtacattcacctgattagagataatcggcacggccacaatcaggccataacctatcaaactgcttaaccagctcaggcgacgactccagtaacgggcgctctcgtcctgaatcgtgaacgggcgcagttcagccacgtttgggcaaaaaatcaggcgtagtacggctttgaaaaattcaatcagggcaaaggcgttgagaaacaaactttgttggaaagcgatggtgcgactgcccgcattcaggttgtcgcttaatacctggccgacaaacaatgtcagtgccagtaacagtaggtcgataataaacgccccgataatcatcgccggaagctgcagccagttgctgcgttcgcgatttttttgccgcgcccactggcccattttgcgatacagcggcagtgcgcacagacgaatcagccagtaaaaaccaaacactaataccgctaacattgaaaaatgggtcaacgcattgctgaaggtttgtggattaaacggcttatgcggggagccggtgatattgcgataaagttgtccgaagcgggcggaaagggcttcaccataatggcggctgacttcggtgaccttttgcagcacggtttgctcttcaaccagcgtcggcggcacgatcttcgggaccggttccgcagggggcgtcgcggcgacagtacgcaactggtcgatcaattctttacgcgaggtgtcgttatccagcacatccgccagtgcgccataggccgcttttttttgttcgatatccggttccggggccggttcagtcgttgagtccgttgtcgttgtggttgtaacgccgggtatggataccgcgtgggcaggtgcgcccagcaggcagaagaggatgaacaggatccaccgcatgactcctccagtgagaaaacagagcaaaaagataagtatagatgctgggggaggggcgattttaaatgagaggaatctggtgtgcctccctttcgggtgaaagggaggcagagaagttaagagacgtgctgcaaaaattcctgcaagcgctggctcggcgggttcttgatcaatacctgcggatcgccatcttccgcaatccggcctttgtcgataaagatcagccgcgaagctactttctcggcaaaaccgatttcgtgggtcacgatcaccatcgtcatcccttcttcagccagatcctgcataaccttcagcacttcatggcgcagttccgggtcaagagcggaagtcggttcatcaaacagcatcattttcggcttcaccgccagcgcgcgggcaatcgccacacgctgctgttgaccaccagaaagttcggaagggtagtgatgtgcacgttctgccagaccgactttcgccagcagctcacgcgccagtttttccgcctcttctttgttcgcgccacgcacgcgtagcggaccaaacatgacgttttccagcgccgtcagatgcgggaagaggtaaaactgctggaacaccatacctgcttcctggcgaatcaggcgctcgtcaactttcggatcgttaaccttcaggccatcgacaatcagatcgccggaggtgatttcttccagtttgttgatgcagcgcagcagggtcgatttaccggaaccggacggcccgataatcaccacgacttcgccctgggcaatgttcaaatcgatattgtgcagcacctgggttgggccaaagtgcttggagacgtttttaaattcaatcacaggattttcatccttctttccagacgacgcagaataaagctcagcaccagggtaataatcagatagaacaccgccacggcgctccagatctcaagggcgcggaagttaccggcaataatttcttgcccctgacgggtcagttccgccacgccgatcacaataaacagcgaggtgtctttaatgctgatgatccactggttacccagcggcggcagcatacgacgcagtgccagcggtaaaatgacgtagcgaatggtttcccaacgtgaaagaccgagcgccagtcctgcttcacgaaaacctttgtggatagacagcaccgcaccacgcgtgatttccgcaatgtacgcgccggagttgatcatgatggtgaccaccgccgcagtaaatgggtcgatgcgtaagtcgttaaacgccatcggcagggcgaaatagataaacatcacctggacgacgataggtgtgccgcggatcacttcaataaagaccagcgcgacgtggttggctatccaaccaccgaaggtgcgtgcaaaacctgccagcaatccgattaccagaccgcctgccagaccgaggaccgaaatccacagggtcattttggcaccttcaatcagaagcggaatggcaggccagatggcactccagtcaaactgcatatgttgttcctgttaccgtggtgtaaataatcaaattcagggtaattaatggccccggagcgggtttgcgcccctcaccctaatcctctccccataggggagagggaactgccagtgcgttttacaggtgtagcgttattatttcggttcagtaccgaaccattttttgtagatttcgttgtaagttccgttctcgcgcagggttttcaacgcgccgttgactttgtcacgcagctcgtcgctacctttcgggaacgcaataccgtattgctgcgcttccagagagtcacctaccgctttgaactgaccgttaccggcggttttgatgaagtacagaatgtttggcgtatcgtgcagaacggcgtctgcgcggttggtgcccagttccatataggcgttatcgatgttcgggaactgacgcagatctttagttttgatgtttgctttcgcgtaatcaacggagccagtaccgctcttcacagcaaccactttcccgtcgagatctttcacgcttttcacatcgttattgttagctttcaccatcactaacaggccgcttttgtagtagccgtcagagaaatcgatcgcttttttacgctcgtcggtgatggtaatgcccgccagcgccagatcgacgtttttggtttgcagtgccggaatgatcccactgaaatccatcggcttcagttcgtaatccagcttcagctctttagcgatggcagcccacagatcaacgtcaaagcccacatatttatcgccctgtttaaattcaaacggaacgaaggcggtatccgtcgcgacaactaattttttatccgcggcatgagaagaaaccgcaaaagccagggtcagtgcagccagtgaaacttttaatacagacttcatagcatttccttttttctatccacgggacgatcccctgcgtgacattcacatatatgaaaaaatcgtgccagttttgcaactccttgatttttcgagatgcggcaaaaacgtgatgcacgatttatagggcaataccctgaagatgcaccattctggggcaccaatctggtgcgctaaaattgtgcactcaacacagtgattatttagcgtaaaacctgatgaaaaaacaatctttatgtaacgattgtgtgatgatgtggatacaaaaaatttacttaatcagctggagatagcagatggatgcactaaataagtgcgttgaggtgggctgcaaaacaaaacggcctcctgtcaggaagccgcttttatcgggtactaaagttctgcaccatcagcgatggatttattcgatgttagactcgataaaccacaggaatttatccaggtcgcgagacgcggcggtcaggatatctgcggtgtcgtcatctttcgcttcgccaatcgctttgcgtacgtcattagcgacgattgcgtaacggtcagccagttctttcaggtgatcctgaacgttgtggatgtccagcgggtaacttttcagcggggttttgctgttgataacttgagtggtccccagagctacaccgcccagctgcactgcacgttctgccatggtatccagatgatcgatcagtgcggtgcggaagccatccagcatttcatgtacggcaatgaagttagcgccgcgcatgttccagtgcgcttgtttggtaatcaaagaaagatcaataaactggataacctggcgattcagcaactctactgttgcttttttctcgctgtcggagacatcgttgcgggtataaagcagattggtcgcttttgatttaactaatttagcggtactcataatttcatatcctcttgatgttatgtcctagtaattaacgagactaagtatagcaccggctatgtgttccgctattctggctgttcctatcacactaatagtggtaacaagcgtgaaaaacaaaactaataaagattcaatgagttagatatattgataagaacaattcttatttatctgctcgccaggaattttcggaataaatatgcttttgcataattcgatatataaagacggtgtagaggaaaagtagcgagaaattctgcatggttatgcataaccatgcagaaatgtaaatttaattaatgtctaattcttttattttgctctctttgcgtactgtcagcgtagaccccattgaagcggcgatgatagcgccgagcgccagcagctgtatgggtgtcagtgtttctccgaggaaaatcatcccggaaacggcagccagcgccggttccatgctcatcagcgtaccaaatgtccgtgttggcaaacgggtgagggcaatcatttccagcgaataaggcagagcggtcgagagaatagcgacagccagacccaatggaataaccgaccagtgccagagtgcttcaccagcctgaagcgctccaattggcacgaaaattaacgctgcaatcaacgaaccaattgccaccgtcgcagggccatgttccgctcctgcgcgttgcccacttaaaatgtaaatagcccaacaagccccggcccccagtgccagcgcacagccggttaaatcgacatgggaaacgtcttgccccagcggtagcaggaaccacagaccaagaaccgccagcacaacccagacgaaatctaccgggcgacgagaagagaacagcgccaccgccagtggtccggtgaactccagcgccaccgcaatacccagcggtactgtctgaatagaaagataaaaaagataattcatcccacccagcgaaacgccgtaaaacaacagcggtaaccgttgctctttggcaaagcgcagtcgccatggcttaaagaacgcgatgaggatcagcgttcctaatgccagacgcagcgcagtgacacccggtgcgcccaccagaggaaaaagtgacttagctaacgaggctccaccctgaatagacgccatggcaacgagcaatatgattattggtaaccagaccggcattttacgtaatgaaccaggcatcctttctcccacaaatatctagacttaagtaaagcgtggagtgtactggatatacccaatgctggttgagcatttgttgaaaaaattttcccccgttttgactaaaatgcgccaggattgatggaatcattagtctggtgattaggaataatctggatgaatgacagggaaaacatgcgtaatacttacgcagttctctgaaaaagtgatttaaatttagatggatagcggtgtatggaaacgttctgttacatgaaatggcccgttagacatcacaaatcgcgaagagtttcccattaatttttgatatatttaaaacttaggacttatttgaatcacatttgaggtggttatgaaaaaaattgcatgtctttcagcactggccgcagttctggctttcaccgcaggtacttccgtagctgcgacttctaccgtaactggcggttacgcacagagcgacgctcagggccaaatgaacaaaatgggcggtttcaacctgaaataccgctatgaagaagacaacagcccgctgggtgtgatcggttctttcacttacaccgagaaaagccgtactgcaagctctggtgactacaacaaaaaccagtactacggcatcactgctggtccggcttaccgcattaacgactgggcaagcatctacggtgtagtgggtgtgggttatggtaaattccagaccactgaatacccgacctacaaacacgacaccagcgactacggtttctcctacggtgctggtctgcagttcaacccgatggaaaacgttgctctggacttctcttacgagcagagccgtattcgtagcgttgacgtaggcacctggattgccggtgttggttaccgcttctaatcactttggtgatataaaaaatccgcctctcggggcggatttttgtttttaaggcttcgggtcgaaaatatcggttccgagatggttgtaatccaccttctgtaactggaagttggtgatgtatatcgacccggctttcttctcagatataaacgggtatttgatgttaatttccttcgctttaattcccgtccactgggagaaaaaacctaagaagtcattggctgagcggcgggctttaatcacccgatgcgctttatcgtcgctggaaatgaccataaaaggcacctggaaattttgctgatacttatcatcatgggcaaggtattgcacgtctttgccgcgctctttaaaggccagaccgtggtcagaaaagtaaaccagcgagaagctgctgccgctgttgcgtaactgatcgtacagcttgcgcagtaaatcgtccgtttgcgtcatggtatagagatagcacgacgtttctttcgactgcacaaaggtttcgtatttgccttgtgtcctgtcgcaggcctgcggatgtgagcccatcagatgtagaacaatcagctgcggttgcgagtgctcttgcgccagcacttgagcggtcatatccagtaacgcttcgtctttggtatttttatctgcttcaaaattaccttctttcaggaagtacacttcatctgctcgtttggcgatgctggcgatagcggtatcgtattcgccgatttgaccctggttggaaaaccaccaggtctggaagcccgcgcgatttgccagggtgacaaagttatcctgaaactgtggtttgccatcgactacgcgattgagcgttaagccaagcgatttctgcgtggagccactggcggcaatgtagtcagcaaatatcaaaccgttaacgctgctggcaaacggggtattgtcccagtgaccgccaaaggcaccgagggcatcgcgacgcgcgctttcaccgatcaccaccacataggtctgatacttcggcttaacggcagtgaccgtccaggtatctttcattccggaaagttttgccatccgttcttgctcttcaatcacctcgttattattgacgatgacatccttagcaaaacgaaataccggatagccagtatctttcagtttaaatacgccgccccaggccaggttttgcacgggagcaacaaaaaatgtcgccacactgaataccagacacaggctgtcgaaggtattccagcgcgctttttcactctctttttttcgcctgattgctattacgccgagcacaaaaataaatatgccgaccatgtagctgtaccacggaaaaatcgtcaggatttcggtcgactcttccatattggtggagtgcaatgccagcaatgtattgaaattaggcgcgccgtaggcctgagcaaaagggaaataacaagccgccaccagcgaactgacaccgaccagaactttttgtacgcgaggcaatgttcgccatagcaaaagcaaaatagccgtaaacgcagcggtgtagagcaaactgaaggggtaacctaagccgaggttaattaatagcgactgtaaaaagtagaacgcagtccacgggctaaatacccggctacgggtaacaagcgattctttgagggttaaattcatatgccactatcgtaacaaacgccatgtgcttaccctggcgtcaagggtcaatacctgcaagagtgcgtgaagagtggaaaggggtccgcatccgcgagccgcaatatacgcagggctgcaagaagatagagcgagccgccgttcaggtcaactactgacgaacaaatcttttgcgaaggggattgcaaatccgacaaaaagtggggtttttcagaccaaaacgcgttatgcctgcatgaaagcaggagtgaagcggcgtaccgcgacgccgctatttatcggaaggtttatcttgctgcggtttgttgttgaccatatcgcacaacatagagagcagcattaaccgtactttaaagggagaatgactaaacacgcgcatacacctcttgaactcattcataagacctcctgacttgctaatcccgtcgatccttgaggatgattgcattacatacagatatagcacaggctatattatatagctattgctaaaacgttaattttttgtaccttcgcaactctggtttacaatgtgcgcacgaaatgagaacgctatgtatgcgtcaccataatgaggaagcacaatgagtcgtcgcgcaggtacgccaacagcaaaaaaagtgacgcagttagtgaacgtggaagagcacgttgaagggttccgccaggtcagagaggcgcatcggcgcgagcttattgatgattacgttgagctgatttctgacttgatcagggaagtgggggaagctcgtcaggtggacatggctgctcgtctgggagtttcgcaaccgacggtggctaaaatgcttaagcggctggcaaccatggggctgattgaaatgatcccctggcgtggcgtgtttttaacggcagaaggagagaagctggcgcaggaaagccgcgagcgacatcagatagtcgaaaatttcttgttggtgttgggcgtcagtccggaaatcgcccgtcgcgacgcggaaggcatggagcaccatgttagtgaagagacgctcgacgcttttcgtttgtttacccagaaacacggtgccaaatgagcctgccttttttacgcacgctgcaaggcgatcgtttttttcagttattaattcttgttggtatcggattaagctttttcgtgccctttgcaccgaaatcctggcctgctgctatcgactggcacaccatcatcaccttaagcggcctgatgctgctgaccaaaggtgtggagttaagcggttattttgatgtgctggggcgcaaaatggtgcgccgctttgctacggagcgtcggctggcgatgtttatggtgctggcggcggcgctgctttctacctttctgaccaacgatgtcgcgctgtttattgttgttccgctgactatcacgctaaaaagactgtgtgagatcccggttaatcggctgattatttttgaggcgctggcagtcaacgctggttcgctactgacgccaattggcaacccgcaaaatattcttatctggggacgttctggtctttcgtttgccggatttattgcccaaatggcaccgctggctggcgcaatgatgctgacgctcctgctcctgtgctggtgttgtttccctggaaaggcgctgcaataccatacgggggtgcaaacaccggagtggaaaccgcggctggtgtggagttgtctggggctgtatatcgtctttctgacggcgctggagttcaaacaagagctgtggggactggtgattgtggcggcaggctttgcgctgctggcacgtcgcgtggtgctcagtgtggactggacgctgctgctggtgtttatggcgatgtttatcgacgtccatttactgacccagcttccagcgttgcaaggcgtgttgggtaacgtgagtcatctatctgaacccgggttatggttaacggcaatcggtttatcgcaggtgatcagtaacgtgccgagtaccatattgttgctgaactatgtgccgccgtctttattactggtatgggcggtaaacgtaggtggctttgggttattacccggatcgctggcaaatttgattgcgctacgtatggcgaacgatcgccgcatctggtggcgtttccatctctattcaataccgatgctgttgtgggcggcgttggtgggatatgttttgttagttatactcccggccaactagggtctggcaaataaaaaaggcggattatgagtccgccttttgctttaagttttgaagattaattcagacgaaccggcatcccggagcggtttttaatcgcttcatcaagaacaacctggtcaacatctggctgaccggtcactgtttgcacgctcttcgtcagggtaattggcacaatttcctgaccttcaaactgggcttcggtggtagacagcgggttatggacttcaatataacggctgccgtctggctcggtggtcgcttttaccggctcatcaataaactgtacgcgggtaccgaccggtactttctcgaacaggaatttgatgtcttcgttacgcagacgcacacaaccatgacttacacgcaggccgataccgaagttggcgttggtgccatggatagcgtacaggcgaccgatgtagagtgcatacagccccatcgggttatccggacctgccggaacgacagccggaagcggttcgcccgcagcgcggtactctgcgtgcattttggcggtcggcgtccaggtcgggcctgctttcttacgctcaactttagtggtccagttgataggcgtatctttgcctaactgaccaatgccgatcggcagcacgataacggtgttggtccctttcggatagtaatacagacgcatctctgcactgttaatgacgatgccttcatgaacggtatccggcaggatcagctgctgcggaatgttcagtacagtaccgcctttcggcaggaaggtatccacacccgggttcgcttccatcatattggaaagccccatctggtactccgcggcaaaatactccagcggctgagtgttaccttcaggaatggtgatcacctgattctgaccaaccaggcgactcccgtcggttggcagaggataagttaccgcagaggcggtactgcaaaagccgacaacagcgaaggccgctgcgaataatgttttcaatttcatattcatgttaagcgagattttgtgcctggcaggccattgggttgagaatattagagtattggaagcgcattataagttcattccagctcacagtgaaatcagatgtgtacgaaatcacattttttgcctttggcttgagtgtagaccttaagcgaggagcaggatcttctttcagacttatggcataatgcgcggtttgtcatatctcttttcaggatacgcctgtgttagtttccagtaacgtcaccatgcagttcggcagtaagccgttgtttgaaaacatttccgtcaaatttggcggcggcaaccgttacggcctgattggcgcgaacggtagtggtaaatccacctttatgaagatcctcggcggcgacttagagccgactttgggtaacgtttccctcgatcccaacgagcgcattggtaagctgcgtcaggatcagtttgcctttgaagagttcactgtgctggatacggtgatcatggggcataaagagttgtgggaagtgaagcaggagcgtgaccgcatctatgctttgccggaaatgagtgaggaagacggctataaagtggccgatctggaagttaaatacggcgaaatggacggttactctgcggaagctcgcgccggtgaattgttgcttggcgtgggaattccagtggaacagcactacggcccgatgagtgaagttgctcctggctggaagctgcgtgtgcttctggcgcaggcgctgtttgctgatccggatattctcctgctcgacgaaccgaccaataacctcgacatcgacaccattcgctggctggaacaggtgctgaacgagcgtgacagcaccatgatcatcatctcgcacgaccgtcacttccttaacatggtttgtacccacatggcggatctggattacggcgagctgcgcgtttatccgggcaactacgatgagtacatgacggcggcgacccaggcgcgtgaacgtctgctggctgataacgccaagaagaaagcgcagattgctgagctgcaatctttcgttagccgctttagcgccaacgcctcgaaatctcgccaggcaacttcgcgcgcgcgccagattgataaaatcaaactggaagaggtgaaagcctccagccgtcagaacccgttcatccgttttgaacaggataagaaactgttccgtaacgcgctggaagtggaaggtctgaccaaagggtttgataacggtccactgtttaaaaatctcaacttgctgctggaggtcggtgaaaaacttgcggtactgggtaccaacggcgtcggtaaatcaacgctgctgaaaacgctggtgggcgatctgcaaccggacagcggcaccgtaaaatggtctgaaaacgcgcgcattgggtactatgctcaggaccacgaatatgagtttgaaaatgatctgaccgtgttcgaatggatgagccagtggaagcaggaaggcgatgacgagcaggcggtacgcagcattctcggtcgtttgctgttcagccaggacgacatcaaaaagccagctaaagtgctttccggtggggaaaaagggcggatgctgtttggtaagttaatgatgcagaagccgaacattctgatcatggacgaaccgaccaaccacctggatatggaatccatcgagtcactgaacatggcgctggaactgtatcagggcacgctgatctttgtttcacacgaccgtgagttcgtaagctccctggcgacccgcattctggaaatcaccccggaacgcgtgatcgactttagcggtaattacgaagattacctgcgtagtaaagggatcgagtaagtgattatccgtcaccccgatactgtcggggtgacggcggctgatgacaaatgcaaaatagcctgatgcgctacgcttatcaggccttgtattatccctccagtgcagagaaaatcggccagttttctctgcctgcagtccgcatgccgtatcgggccttgggttctaacctgttgcgtagatttatgcagcggactgcctttctcccaaagtgataaaccggacagtatcatggaccggtttcccggtaatccgtatttgcaaggttggtttcactatggaacatgaacttcattatatcggtatcgacaccgctaaagagaaactggatgtcgatgtgttgcgtcctgatggtcgtcatcgcaccaaaaattcgctaacaccactaaagggcacgatgagctggtgagctggctgaaaggtcacaagattgaccatgcgcatatctgcatcgaagcgaccggcacctatatggaacctgtcgctgagtgcctttacgatgctggctacatagtgtcagtcattaatcctgcgctgggtaaagctttcgctcagagtgaaggactgcgtaacaagactgataccgtggatgcgcgcatgctggcagagttctgtcgtcagaagcgccctgcagcctgggaagcgcctcacccgcttgaacgcgcgttgcgtgccctggtagtccgccaccaggcgctgacagatatgcacacgcaggaactgaatcgcactgaaacggcgcgggaagtccagagaccgagcattgatgctcaccttctgtggcttgaagcagagctgaagcgtcttgagaagcagataaaagacctgacagacgatgatccggatatgaaacaccgcaggaaactgctggaaagcatcccgggtatcggagagaaaacatctgcggtattgctggcttatatcggtctgaaggaccgcttcgcccatgccagacagttcgccgcttttgcgggtctgacaccacggcgttatgaatcaggtagcagtgtgagaggggcgagccggatgagtaaggccggacatgtgtcgcttcgcagggcgttgtatatgcccgcaatggtagccaccagtaagactgagtggggacgggcgttccgcgacc

SEQ ID NO: 482 - DNA, 175786 bp, Escherichia coli
cgtctggcggctaatggcaagaaaggaaaggtgattctcggcgcgatgatgcgcaagctggcacaggtggcgtatggagtgctgaagtcaggcgtgccgttcgatgcgtcacggcataatccggtagcggcgtaaaaatcgcggaagggatgaaaaaaacagcgcctgacggcgctgtgtctggcatgcctgcaatccgggaaaccggaccaggaaaaaacttgcaggccataacagtatctacgcagtacctgtaatatattgaatctgcaggactttgtaggccagataagcgtagcgcatcaggcattaagaaagcgcacttgtcagcaatctgagtaacgtcgaatcgattttcttaatcccacatcaattcacttccattaactctcaaacatccatgcccaacgctcgcttaccgtgaatgttgaggtcggcaagcgtaaagcgtccttcccagtttgtttcatagtcctcgcgcgggaagtcgcccggcgatgcgcctttttccagtgcggccttcaccttgtgcgcgtaggcaagatttttctcgcacatcggtgccgcaggaatgtacatcacgttgccccaaccctgttgattttcaacgggggcaacggaatggatgacgtcgcagtgccaccagacggagtctccggcctcgagttttggaatgctggttaacgcctcaattaacagtggatgccattgctctgataccggcaacactcttccgggcgctacgccgcacagttcatcctccggcacatcatcaagcagcggacgtaacagtacgtacgccatggcttcaggaatgggcacaacgtgcagcaacccctgaccaggcagcatatcagagagcgctgtccagccctggaatgtccgaaacacggaacatttggtggtgttgtccaccgtgtactcttcaacttccgtacgatgtgccgcatgccagggatcatattgcgccagattgccattaaagacgttggcgaaaacgcgctgatacgctggaagcagccagcgttccagcgccccggagtcggtatgcgctccaagacctttggaggtcgttccgggcggacggcggcggatacggtcagggtagatgacgctcacatccgggttaaaccattgctttccatcactttcaaatgtccacagacgattgagaaacgactgcgcattcgccatttcttcactctggcgggcctgcatttgcgcctgcgaccagtagatggggtaaatctcgggacgtgaagcgctgagcgtcccgaagaaattatcgccggggcctttgtagacctcgtcaaagcggttgcggtccagatagtccagcatcgactgatcccagcctagcgcttgttcgcgggggaaatggccttttatcaccgcacaaccgcgacgtttaatctgttcgcgctgctctgcagtaacatgacctgctttgatatcggcataagacagcaccggccagacggcatcgccctgtgctttgagtgcgttgatttcagccactcgcgtggcaatgtcatcgcttagctgattaaagatctgctggacgtcgccaagctgcgcccgcagcgcgtgcttcatctgacggatagctgctttgtgatcggcaggcaatgtgtcgctggtaaaagtagaagccataaccacctctcattaactttcattcaaaaccattctgatttgcatgtgacaatataagttataaataagttaatgcaagtttaatgatttgatgtgatgtacaggatgtaaaaagaagggaaaaccggagcgcacggctccggtagagaggtcagctgttaaaaggggatgtgttatccagcaccgcctgaatcacattcagcgcgccttcatgattattatcatcggtagcgtaacgggcgatttgtttaatgttttccgcagcattgcccatcgcaaaggaataacgcgccattttcagcatctccgcatcgttaccgctgtcgccaatcgctaccacattttgcggtgacagatcccagcgtttcagtaaccgcgaaataccgtttgctttatgtagaccgggaataatcaggtcgataaagccaaaaccactggtgacgggtttcataatgccatcgagcgctatgtgcagtttgtcgatcactaacgggatttgttcatctggcaggttgagcgaaaacttgaacagtacgtcgtcaatctcctgataatcttttacagctttcaggcgatggtagtgttttgccatcagtgcgacaaatgcttcgggggcattttcgctgacatatgcactttgcagaccgcaggcgacaaaattgagttgcttatcttttagcaactcgccaataacaatccgcgattcatgtcgggtcagttcgccgtggaacagttgcttgccatgttcgtaaaccagtgcgccgttttccgcgacaaaagagatctcatcctttagctcaggaaagaacgaaataagctggtaatactgattaccgctggcgacaacgaactcaatgccgcgctttttcagttcctgatattgcgccataaaacgtggttggttgtacgttttggcgtcgttaagaaaagtaccgtccatgtctgtgacgataacttttacgctcataggtgtgctcctggctcgaaaatgaaaccgtaacagtgtaataacaatgtgacgcagagcacaaattatatttcgaatgaaagtaaggatggaattgattatgtgaatgatttagcccggcgacgccgcagccgggccgaagagattacagcatatgttcagtacgagcgatgatatcgtcctgagcgtctggagagagcgcggtgaagaaggcggaataacccgcgacacgcactaccagatcgcggtactgatccggatgttttttcgcctccagcagcgtttcgcgggaaacgatgttgtactgaatatgccagcctttatgcacctcgaagaaggtgcgcagcaggatcatcagtttctgcttgtcagattcgttctccagcgttgccggattcagtttctggttgagcaacacgccgccgagaatcgctgccgtaggcagtttacccaccgagccaatgaccgcagtagggccgagatggtcagtaccagaggccggactagcgccttctgccagcggggtgtgggctttacgcccgtccggtgttgccatagtttgcgcgccaaacggtacgttagcggagatagacgaggtacccgcgtaatagttgccgccaaccggaccacgaccgtagcgcgggttatggtactgtttcagttcgtcgatataggtctgataagcgcgagccagcagcgtatcgacggtatcatcgtcgttgccgtacttcggcgcaccgttaatcagccgctgacgcagttgctcatgagtcaggccatcgaagtcatccgccagtgcggcagccagctgttgctgaccaatcgcgccctgttcaaataccagtttcttcactgccgccaggctgttgccgaggttggcaatgccaacctgcaggccagaaacccagtcatatttcgcgccgccttgcttgatacttttcgctcgctcaatacagtcatccaccagcgccgagcagagaatatcgtgtacgttctcttccagcatggtgtcgacgacatattcgatttcgattgatttacgcgtgtaataacggatttgcgtatcccacgcgtccattacttcatcgaaattgttaaagttgcctgccgacaacgctttttcttgtggcaggaacactttgccgctggtggcatcacgcccgccttccagcgccgccagcatcacgcgggcgaagttgataaagctcatgccggtacagcgatagccccatttgccaccgacggcggtttcgatacaaccaatcgctgcgtagtcgtaagcgtcctgcggttcaataccgagtttaataaattccgggatcacgatttcgtcgttgttgaacgccggcatcccgaagccgcaacggatcacctgtacgcaggcgtcgaggaaatcattactcattcctgcatggtaacgcacgctgaggttaggctgagtggaacgcaggcgaccgcaggattcgaggatcgcgtaagagaggggattcactgcatccattggttgaccatcaaccagattttgtccgccaatggtaacgttctgatacagcggacttcccgcagaggcttttgagtgtgagccggagcggatcttgttcacttccagcagtttcagccagcagctatgcagcatctcgatggcgtgttcgcgatccagcgtctggttgagttcaacgtcgcggcgatagtacgggtagagatactggtccatacgaccaaacgataccgagtgaccgttagattcgatctgcaaaatcaattggatgaagtaacacagttgcagcgcctgccagaaagtctgcggcggctggtgggcgataagatcgcagttttctgccatcgtcagcagttcatcgcgacggctttcgcgagtttcggtagcagccatttcacgcgccagggcagcgaaacgttcaatgtgttcactgactgccaccagcacgatatcaatcgctttcaggaattgttcgccatgtaaatcttccagcaccgtcagattgatgcgcgagcgacgttccgctactttctcacgcagaccatcaagacctttttccagcagcagcgggaaattcaccgccaggtgcgcatcgccggaggtcatattgccttccgctttaatgattccggtcgccagcagacctttttgctcatcggtaaacatgccgtagcagcgatcctgtacggtctgaccgcgccaccacgggcacacttcatgcagaacgcgtttgttctcttcgctcaccgcaaagccagcaccgggacgatctgccagatcatcaatctctttttcgatccacgagacagtatattccgggaagatcggcgcggcgcgaacttcgcttgcctggttgccaatgatcaactcatcgtgtttgatccagatggtgcgattcgccaggtgatgcgccagtgccagcgcgcgacgtaccgggatcggcttatcgagatgttgttgatacatctcggtatagtgctgcgcgcgctcggtacagactggcggtttcacaatatgcaccagcgcatttttgtgcgctttaatgcggtcgctgagcgtgtccagtttcagtgtggtcatggttgttatcctcgtaaggtcgcggttaaccctttctggcaggcatactgctgggcaaaatcgagcagctctggcgcatcaagcggtttttccggggcgtcatagggcagattaagtaagtgatatttgttgatgcccagcgtgtggtagggcaggaaatgaatttcgccaacgtgcagctcgtcggcggcaaaatcggtaatggctttcacagaggtttcgtcggcattaaagccctgaatcagcggcacgcggataatgatttttttgcccgctgcggcgagttttttcaggttatccagcaccctggcggcgttaccgtcggtccactgtttaaacggcgcgtcggcaacgtgttttaaatcggcaagaaacagatcgatatagggcagagaaggggcgatatatttccacggcacatgcagacaggtttctaccgcagtatgaatgccggcctcgtggctggcttgcagtagcgccatcgccatttccggctgcataaagggttcaccacccgaaagcgttaaaccgccgccgctgcgatcgtaaaacggtttatcgcgcagaacggtcgtcatgatctcctcaacgcttttcacttcaccacacacggttaatgcctgtgtcggacagcagtcggttaacgccgtcagatgctccggggttaacttttcccgatgaataagcaaaccattcagcgcgcgctcaatcacttccggcgcggccttagcgcacagctcgcagccttccagacacagtcgtgggtcatacagcagatcctgcgtgcgggcgcggctttccgggttctgacaccagcggcagcccagcgaacagcctttaagaaatacgaccgtgcggataccggggccatcatgggtcgagtagcgctgaatattgaaaatcatagttgcctctctgtttcgttcaaacattaaaatactttcgaatgaaagttagattgatgtgcgtcaactgttcagagagttttcccgtgatagtctacattcagacaaaaagtacattttgaggatggttatggaactgtatctggatacttcagacgttgttgcggtgaaggcgctgtcacgtatttttccgctggcgggtgtgaccactaacccaagcattatcgccgcgggtaaaaaaccgctggaggttgtgcttccggaacttcatgaagcgatgggcggtcaggggcgtctgtttgcccaggtaatggctaccactgctgaagggatggtgaatgacgcacgtaaattgcgctctattattgcggatatcgtggtgaaagttccggtgaccgccgaggggctggcaactattaagatgttaaaagcggaagggattccgacgctgggaaccgcggtatatggtgcggcacaagggttgctgtcggcgctggcaggtgcggaatatgttgcgccttacgttaatcgtattgatgctcagggcggtagcggtattcagactgtgaccgacttacaccagttattgaaaatgcatgcgccgcaggcgaaagtgctggcagcgagtttcaaaaccccgcgtcaggctctggactgcttactggcaggatgtgaatcaattacgctgccgctggatgtggcgcagcagatgattagctatccggcggttgatgccgctgtggcgaagtttgagcaggactggcagggagcgtttggcagaacgtcgatttaaccggacgttctgcatcctcataaattgctgatgacgtggcggagtgcaccgatgcctgccacgtcttatcaggcctggaggtggcaattactgcccgcacacctcacaccccggattacgcatcagtttcatttcgcgaaactgacaggtcatcgcatcgtacatgacgattttcccgctggccggtttgccataacctgccagcagcttgatcgcttccattgcctgcaacgaaccaatcacgccaatcaacggtgccattacgcctgcttccacgcaggttaatgcattttcaccaaacaaacggctgaggcagcggtagcatggttcaccgtcctgataagtgaagaccgtgatttgaccttccatacgaattgccgcgccggaaaccagcggtaccttcgcggcaaaacagcctgcgttcagttgattacgtaccgcaacgttatccgtacagtcgagcaccagatcgtgttcagcaatcatcgcagcaagttcagcgtcatccagcagtgcattgactggcgtaatcgcaatatgcgggttgatccgcgccagggcgtcacgtgcggattcaaccttaggttgcccgaccgtggcatcactgtgcagcgtctggcgttgcagattcgagagcgaaaccgtgtcgaagtcgagcagcgtcaggttgccgacaccggcgcttgccagatactgcgaggctgcgcagccgagtccaccgaggccgacgaccagcacacgagaatcttttagcgcctcctgaccgtcaaaatcaaaaccgcgcagaatgatttgccggttgtagcgcagcatctcctgatcgctgagttccgccattacaggcctccgaacaacgcgttaaatggttctacttccacccattcgcccacgtccacattgccgcgatcgcgttccagcacgataaagcagttgccgaggctaaaggagctaaatatatgtgaaccctgatgtccggtggtcgtcacttccagttcgccatcggcgttgcgttgcagcacgccgcgctggaaatcaaggcgacctggcgtttttttcaggcgggacgctgtgcgtacgcgctggcgcgcgggcaggccgctggcggtgttaccgcttaattttgccagcaaaggctgtaccagttgatagaaggtcagcgtcgctgaaaccgggttgcccggcaggccgcagaaccagctattagaaagtttaccgaacgcgaacggtttacccggtttaatcgccagcttccagaaggcgatctcccccagctcttcaagaatggttttggtgtaatccgcttcacccactgaaacaccgccggaactgatcaccacatccgcctggctgtcggcttcaataaatgcggcgcgcagggcatgtggatcgtcgcggataatccctaagttgattacctcgcatcccaactgttctaacatcaggtgtacggcgagacggttggtatcgtagatttggccatcgcccagtggctgaccgggcaactggagttcatcaccggtagaaaaaagcgctacacgcactttacgaatcaccggaacttcggcaatccccagtgaagcaatcactggcagttcagcggtagtcaggcgagttcccgccgggaaaacaaccgcacctgcagagatatcttcaccgcgacggcgaatattttgcccgctacgcacttcagcagtaaaacgcacgccattgtccgtttgttcagtctgctcctgcatcaccaccgcttcgcagccttccggcaccggcgcaccggtcataatacgaatgcaggtacccgcaggccattcaccatggtacggctgaccggcaaaggatttaccggcaacgggcagcggttgcctggaggcaatatcggctaaacgcaccgcgtagccgtccattgcggagttatcaaaccccggaacatcaagcggcgaaacgacatcgctcgccagaatacgaccaaaacactgtaccagtggcagcgtttcctgggcggtcagtggggtgacgcgagaaagcatctcattaagcgcggtgtcgagcgacatcaatccggtggtaaattccatgaaaacactcctgcggaggcaaaatcgaatttgcctattatgtcagaaaaacgccacagactgtatgccacctcgggcgtagcgctgggtcctgcctttacatgccatatccatctttctatattcaaaaattgaatgagtaattcataaaaattctgatatttatagcaaaagtggcgagccacccttaatggacgaatactatgggcaaagcagtcattgcaattcatggtggcgcaggtgcaattagccgcgcgcagatgagtctgcaacaggaattacgctacattgaggcgttgtctgccattgttgaaaccgggcagaaaatgctggaagcgggcgaaagtgcgctggatgtggtgacggaagcggtgcgtctgctggaagagtgtccactgtttaacgccggaattggcgctgtctttacgcgtgatgaaacccatgaactggacgcctgtgtgatggatggtaacaccctgaaagccggtgcggtggcgggcgttagtcatctgcgtaatccggttcttgccgcccggctggtgatggagcaaagcccgcatgtgatgatgattggcgaaggggcagaaaattttgcgtttgctcgtggcatggagcgcgtctcgccggagattttctccacgcctttgcgttatgaacaactactggcagcgcgcaaggaaggggcaaccgtcctcgaccatagcggtgcgccactggatgaaaaacagaaaatgggcaccgtgggggccgtggcgttggatttagacggcaatttggcggcagccacgtccacaggcggaatgaccaataaattacccggacgagttggcgatagtcccttagtgggtgccggatgctacgccaataacgccagtgtggcggtttcttgtaccggcacgggcgaagtcttcatccgcgcgctggcggcatatgacatcgccgcgttaatggattacggcggattaagtctcgcggaagcctgcgagcgggtagtaatggaaaaactccctgcgcttggcggtagcggtggcttaatcgctatcgaccatgaagggaatgtcgcgctaccgtttaacaccgaaggaatgtatcgcgcctggggctacgcaggcgatacgccaaccaccggtatctaccgtgaaaaaggggacaccgttgccacacagtgatgaacttgatgccggtaatgtgctggcggttgaaaatctgaatattgcctttatgcaggaccagcagaaaatagctgcggtccgcaatctctcttttagtctgcaacgcggtgagacgctggcaattgttggcgaatccggctccggtaagtcagtgactgcgttggcattgatgcgcctgttggaacaggcgggcggtttagtacagtgcgataaaatgctgttgcagcggcgcagtcgcgaagtgattgaacttagcgagcagagcgctgcacaaatgcgccatgttcgcggtgcggatatggcgatgatatttcaggagccgatgacatcgctgaacccggtatttactgtgggtgaacagattgccgaatcaattcgtctgcatcagaacgccagtcgtgaagaagcgatggtcgaggcgaagcggatgctggatcaggtacgcattcctgaggcacaaaccattctttcacgttatccgcatcaactctctggcgggatgcgccagcgagtgatgattgcgatggcgctgtcatgccgcccggcggtgctgattgccgatgagccaaccaccgcgctggatgtcactattcaggcgcagatcctgcaattaatcaaagtattgcaaaaagagatgtcgatgggcgttatctttatcactcacgatatgggcgtggtggcagagattgccgatcgggtactggtgatgtatcagggcgaggcggtggaaacgggtaccgtcgaacagatttttcatgcaccgcaacatccttacacccgtgcgctgttagctgctgttccgcaacttggtgcgatgaaagggttagattatccccgacgtttcccgttgatatcgcttgaacatccagcgaaacaggccccccccatcgagcagaaaacggtggtggatggcgaacctgttttacgagtgcgtaatcttgtcacccgtttccctttgcgcagcggtttgttgaatcgcgtaacgcgggaagtgcatgccgttgagaaagtcagttttgatctctggcctggcgaaacgctatcgctggtgggcgagtctggcagcggtaaatccactaccgggcgggcgttgctgcgcctggtcgaatcgcagggcggcgaaattatctttaacggtcagagaatcgataccttgtcacccggcaaacttcaggcattgcgccgggatattcagtttatttttcaggacccttacgcttcgctggacccacgtcagaccatcggtgattcgattatcgaaccgctgcgtgtacacggtttattgccaggtaaagacgcggctgcacgcgttgcgtggttgctggagcgcgtgggcctgttacctgaacatgcctggcgttacccgcatgagttttccggcggtcagcgccagcgcatctgcattgctcgcgcgttggcattgaatccaaaagtgatcattgccgacgaagccgtttcggcgctggatgtttctattcgcgggcagattatcaacttgttgctcgatctccagcgtgatttcggcattgcgtatctgtttatctcccacgatatggccgtggtagagcggattagtcatcgtgtggcggtgatgtatctcggacaaattgttgaaattggtccacggcgcgcggtcttcgaaaacccgcagcatccttatacgcgtaaattactggcggcagttccggtcgctgaaccgtcccgacaacgaccgcagcgtgtactgctgtcggacgatcttcccagcaatattcatctgcgtggcgaagaggtggcagccgtctcgttgcaatgcgtcgggccggggcattacgtcgcacaaccacaatcagaatacgcattcatgcgtagataacattcaggcggagaataaaatggcaagagctgtacaccgtagtgggttagtggcgttgggcattgcgacagcgttgatggcatcttgtgcattcgctgccaaagatgtggtggtggcggtaggatcgaatttcaccacgctcgatccgtatgacgcaaatgacacgttatctcaggccgtagcgaaatcgttttaccaggggctgttcggtctggataaagagatgaaactgaaaaacgtgctggcggagagttataccgtttccgatgacggcattacttacatcgtgaaattgcgggaaggaattaaattccaggatggcaccgatttcaacgcagtggcggtaaaagcgaatctggaccgggccagcgatccggcgaatcatcttaaacgctataacctgtataagaatattgccaaaacggaggcgatcgatccgacaacggtaaagattaccctcaaacagccgttctcagcgtttattaatattcttgcccatccggcgaccgcgatgatttcaccggcagcgctggaaaaatatggcaaggagattggttttcatccggtgggaaccggaccgtatgaactggatacctggaatcagaccgattttgtgaaggtgaaaaaattcgcgggttactggcagcctggattgcccaaactggacagcataacctggcgtccggtggcggataacaacacccgcgcggcaatgctgcaaaccggtgaagcgcagtttgctttccccattccctacgagcaggccacactgctggagaaaaacaaaaatatcgagttgatggccagtccgtcaattatgcagcgttatatcagtatgaacgtgacgcaaaagccgttcgataacccgaaggtccgtgaggcgctgaattacgccattaaccgtccggcgctggtgaaagttgcctttgcgggctatgcaacgccagctactggtgtggtaccgccaagtatcgcctacgcgcaaagttataaaccgtggccttacgatccagtgaaagcgcgcgaattactgaaagaggcgggatatcccaacggtttcagtaccacgctgtggtcgtcacataaccacagcaccgcgcagaaagtgctgcaatttacccagcagcagttagcgcaggtcgggattaaagcccaggtgactgcgatggatgccggacagcgggcggcagaagttgaaggtaaagggcaaaaagagagcggcgtgcggatgttctacactggctggtcggcttcaaccggcgaagccgactgggcactatcgccgttgtttgcctcgcaaaactggccaccgacgctgtttaataccgcgttttacagcaataaacaggtggatgacttcctggctcaggcactgaaaactaatgatccggcggaaaagacccgcttgtataaggcggcgcaggatatcatctggcaagagtcgccgtggatcccgctggtggtagaaaaactggtgtcggcacacagtaaaaacctgaccggtttttggatcatgccagacaccggcttcagctttgaagacgcggatttgcaataagcaacgcagggagtggaatgcttaattacgttatcaaacgattactggggttgattccgacgctgtttatcgtttcggtgctggtgtttttatttgtgcatatgctgcccggcgatccggcgcgattgattgccgggcccgaagctgatgcgcaggttatagaactggtgcgtcagcagctggggttggatcagccgctgtatcaccagttctggcactatatcagcaatgctgtgcagggggattttggcctgtcgatggtgtcgcgtcgtccggttgccgatgagattgccagccgctttatgccaacgctgtggctgaccataaccagtatggtctgggcggtgatatttggtatggcggcgggaattatcgccgccgtctggcgtaatcgttggccggatcgattgagtatgaccattgcggtgtcggggatctcgtttccggcatttgcgctggggatgcttttaattcaggtattctccgttgaactgggctggctgcctaccgtgggagcagacagttggcagcactacattttaccctccctgacgctcggcgcggcagtggcagccgtgatggcgcgatttacccgcgcgtcgtttgtcgatgttttaagcgaagattatatgcgtaccgcgagggcgaaaggggtgagcgaaacctgggttgtcctcaaacacgggctacgtaacgcgatgatcccggtagtgaccatgatgggcttacagtttggctttttgctcggtggttctatcgtggtggagaaagttttcaactggcccggacttggacgcttactcgttgactccgtagaaatgcgcgattacccggtgattcaggcggaaattctgcttttctcgctggaatttattcttatcaacttagtggtggatgtgctttacgccgccattaacccggctatcaggtacaagtaaggatgcgactatttaactggcgacgtcaggcggtgttaaacgccatgccactggtcaaacctgaccaggtgcgtacaccgtggcatgaattctggcgacgatttcgccgtcagcatatggcgatgaccgccgcattattcgttattttattgattgtggtggccatttttgcacgctggatcgctccctatgacgccgaaaattattttgattatgacaatctgaataacggaccttctttgcagcactggtttggcgtcgattcactggggcgcgacattttcagccgtgtcctggttggtgcgcaaatctcgctggcggcgggcgtgtttgccgtgtttatcggtgcggcgatagggacgttgctgggcttgctggctggatattatgaaggctggtgggatcggctgatcatgcgcatttgcgatgtgctgtttgccttcccgggtattttactggcgatcgctgttgttgcggtgttgggaagcggcattgctaacgtgattatcgcagtcgccattttttccatccccgcgtttgcccgcctggtgcgcggcaacacgctggtgttgaaacagcaaacctttattgagtcagcacgcagtattggtgccagcgatatgaccattttattgcgtcatatcttgcctgggaccgtctcgtctatcgtggtgtttttcaccatgcgcattggcacctcgattatctctgccgccagcctgtcatttctcggcctcggtgcgcagccgccgacaccagagtggggagcaatgctcaatgaggcacgagcggatatggttatcgcgccgcatgtcgctgtttttccggccctggctatttttctgaccgtactggcgttcaatttgttgggcgatggtttacgcgatgcgctggatccgaaaattaaaggatagttacgtttgaatattgcttgaaagggtaatcacctcacaggcaattattgccctaagcaagtgttgtaactttctgctgattttgtagaatcgggtaatttggttaaaaagccgcagcaagggactatttttgcagcggcacagcgttcagatagttattttgttaaatgtattaacatgctgagtttatacgaaaagataaagataaggctgataattttatttttattggcagcactgtcatttattggtctttttttcatcattaactatcaactggtatcggaacgcgcggtaaaacgtgccgatagccgctttgaacttattcagaaaaacgttggctatttctttaaagatattgaacgttcggccctgacattaaaggactcactgtatttattaaaaaatacagaggagattcaacgcgccgtgattctgaaaatggaaatgatgccatttttagactcggtgggactggtacttgatgataataaatattatctcttttcacggagggcgaatgataaaatcgttgtttatcatcaggaacaagtaaatggaccgcttgtcgacgagtcagggcgggttatttttgccgattttaacccatcgaaacgaccgtggtcggtggcttcagatgactctaacaacagctggaatccggcatacaattgctttgatcgtccgggtaaaaaatgtatctcttttacgctacgtatcaacggcaaagatcacgatttgttagcggtagataaaattcatgtcgatttaaactggcggtatctgaacgagtatcttgatcaaatcagcgctaatgatgaagttctatttttgaaacaaggtcatgagatcattgccaagaatcaactcgctcgtgaaaaactgattatttataatagcgaaggtaattataatattattgattctgtcgatacggagtatattgcaaagacatcagcagtgccaaataatgcattgttcgaaatctatttttattatcctggcggtaatttattgaacgcatcagataaacttttttatctaccgtttgcgttcattattatcgtgttgctggtggtatatttcatgaccactcgtgtgttccgtcggcaattttctgaaatgaccgagctggttaatacgctggcgtttttgcccgactcaacggatcagatcgaggctctgaaaattcgcgaaggcgatgcgaaagagattatcagcatcaaaaattcgatcgcggaaatgaaagatgccgaaattgaacggtcaaataaattgctctcactgatctcttacgatcaggaaagcggttttattaaaaatatggcgattattgagtccaacaataatcagtatctggctgtggggatcatcaaactgtgtggtctggaagccgtggaagcggtgtttggtgttgatgaacgcaataaaatcgtcaggaaattgtgtcagcgaattgccgagaaatatgcgcaatgctgcgatatcgtgacattcaatgccgatctctatttacttctgtgtcgggaaaatgtacagacatttacccgtaaaatagcgatggtaaacgattttgacagcagctttggctaccgcaatctgcgcatccataagtctgccatttgtgaacctttgcagggggaaaacgcctggagttacgcagaaaaactgaaactggcgatttccagtatccgtgaccatatgttctccgagtttattttctgtgatgacgcgaaactcaatgaaatagaagagaatatctggattgcgcgtaatattcgccatgcaatggaaattggcgaactattcctcgtctatcaaccgatcgttgatattaacacccgcgccattctgggcgcggaggcgttgtgccgttgggtttctgcggagcgggggatcatttcaccgctgaagttcattaccattgctgaagatatcgggtttatcaatgagctgggttatcagattattaaaacggcaatgggtgaattcagacattttagtcagcgtgcgtcgctgaaggatgatttcttactgcatattaatgtttcgccctggcagttaaacgaaccgcactttcatgagcgttttaccaccatcatgaaagaaaatggcctgaaggcgaacagcctctgtgttgagatcactgaaaccgtgatcgagcgaattaatgaacatttttatctcaatattgaacaactgcgtaaacaaggggtacggatatcgattgatgactttggcaccggtttgtcaaacctgaaacgtttttatgaaattaatccagacagcataaaggtggactcgcaatttaccggcgatattttcggtactgcgggaaaaattgtgcgcattattttcgatctggcacgctataaccggatcccggtgattgcggaaggcgtagagagcgaagacgttgcgcgcgaattaattaaattaggatgtgttcaggctcaggggtatctgtaccagaaacccatgccattctccgcctgggataaaagtggaaaattagtaaaagagtagtttacgtatgtccagaatcaataagttcgtacttacagtcagtctgctgatttttatcatgatttcagcagttgcctgcgggatctacactcaaatggtaaaggaacgggtgtatagcctgaaacagtccgttattgatactgcttttgcggtggcaaatattgctgaatatcggcgtagcgtggcaattgatcttatcaatacgctaaatcccacggaggaacagctgttggttggcttacgcacagcttacgctgactcggtttcaccctcttacttgtacgatgtcggtccttatctgatttccagtgacgaatgtattcaggtaaaggagttcgagaaaaattattgtgcagatattatgcaggttgtgaagtatcgacatgtcaaaaatacagggtttatctcttttgacggtaaaaccatcgtctattacctctatccggtaactcacaatcgtagtctgatatttttgcttggtctggagcgtttttctttactgtcaaaatcgctggcgatggacagcgagaacctgatgttctctctgtttaagaacggtaaaccggtgaccggtgatgaatataatgctaaaaacgccatcttcaccgtttcggaagcgatggagcacttcgcctatttgccgaccggattgtatgtatttgcgtataaaaaagatgtttatttgcgggtttgtacattgattattttctttgccgcattggtggcagtgatatcgggtgccagttgcctctatctggtacgcagagtgattaatcgtggtattgtggagaaagaagccatcattaataaccattttgaacgcgtactggatggcgggcttttcttttcggctgccgatgtcaaaaaactctacagtatgtataactcggcgttcctggacgacctgaccaaagcaatgggcagaaaatcctttgacgaagatttaaaagcgctgccggaaaaaggcggttatttgtgcctgtttgacgtcgataaattcaaaaacattaacgacaccttcggtcatttgctgggcgatgaagtgttgatgaaagtggtgaaaatccttaaatcacagatcccggtagataaaggtaaagtctaccgcttcggcggtgacgaatttgcggtgatttatacgggtggaacgctggaagagttgctatcgattctaaaagaaatcgttcatttccaggtgggaagcattaatttaagtaccagtatcggtgtagcacattcaaatgaatgtcctaccgtcgaacgcttgaaaatgctggcggatgagcggctgtataagagtaagaaaaacggcagggcacagattagctggcagtaatcattattcgcaggccggacaaatgattttgcccggcctgaattaattaaacccggctaccccacaaatcgtactcatcggcgtgctcgactttcacacgcaggatatcacccggcttaacgttggtttcaccattgagataaaccgcgccgtcgatttccggtgcatctgccatgctgcgaccaattgcgccttcttcgtccacttcgtcgataatcaccagaatttcacggcccactttctcttgcaggcgctcggcggaaatctgctgctgcagctgcatgaaacggttccagcgttcttctttcacttcttccggaacctggtcaggcagggcattggcgtctgcaccttcaaccgggctgtatttaaagcagccaacgcgatccagacgcgcttctttcaggaagtcgagtagcatctggaaatcttcttctgtctcgccagggaagccgacaataaaggttgagcgtagggtcagttccgggcagatttcgcgccactgtttgatgcgcgccagttggcgatctacagaacccggacgcttcatcagtttgagaatgcgcgggctggcgtgctgcaacggaatgtccagatacggcaggattttgccttctgccatcagtgggatgacgtcgtccacatgcggataagggtaaacgtagtgcagacgtgtccagatccccagtttcgataactgttcgcacaggctgaccatgctggtttttaccggctcgccgttgtggaagccagtacgatgtttaacatcaacgccataggcggaagtatcctgcgagatcaccagaatctctttaacgcccgcatctaccagacgtttcgcttcacttaacacttcgccaatcggacggctcaccaggtcgccgcgcatagacggaataatgcagaaggtgcagcggtgattacagccttctgaaattttcagataggcataatgacgcggtgtcagtttcacaccttgttctggcaccaggctcaggaatgggttgtgtttcggttttggcacgtagtgatgaacgtgctccagaacctgctcatagctatgaggcccggtgatttccagcactttcgggtggacttcgcggatctgatcttcttttgcccccagacaaccggtcacaattaccttgccgttttcattcaacgcttcaccaatggcttccagtgattcttgtaccgcgctgtcaataaagccgcaggtgttgacgatcaccatgtccgcatcgtcatagctcggtaccacgtcataaccttcagtgcgtagttcggtgagaatacgctctgaatcgacaaggtttttcggacagccaagggaaacaaagccgattttcggctggggagttactttgctcatagcttaaaaaatattcagttacaggaaaggtcagggcagggattctacagagttctggataaaatttgtatcgcaatctcattcgctggcggaggcgaaggaaatgtaaattttgttaatttggcgtgaagaattgatcctggacagcattttgctcaaaaaatagccatactatttaattgcaacaaggctggaaagaggaggatcgaagtatgttcgttgacagacagcgaatcgatctgctgaaccggttgatcgacgcacgcgttgacctcgccgcatacgtgcaactgaggaaggcaaaaggatacatgtccgtcagcgaaagcaatcatctacgagataacttttttaaactgaatcgcgaactgcacgataaatcgctgcggttgaatcttcatctggatcaggaagagtggagtgctcttcatcatgctgaagaagcattagcgacagccgcagtatgtttgatgagtgggcaccatgattgcccgactgttattaccgtcaacgccgataagcttgaaaattgtctgatgagcttaacgctgagtatccagagcctgcagaagcacgccatgcttgagaaggcctgaaaactaagggggagaaagcgtctcccccttcatgtttaagtttttgtaaaaatgaatttgttatctcctccactgactacgctttaagccagagtcaatccggaggcgttatgcatcgacaatcctttttccttgtgccccttatttgtctttcttccgctctctgggcggctcctgcaacggtaaatgtcgaagtactgcaagacaaactcgaccatccctgggcactggcctttttacccgataatcacggtatgttaatcactctgcgcggcggcgagttgcgtcactggcaagtaggaaaaggattatctgcgccgctttccggagttccggacgtttgggcgcacgggcagggcggcctgctggacgtggttttagcgcctgattttgctcagtctcgccgcatctggttaagttattccgaagttggcgatgatggcaaagccggaactgctgtgggttatggccgcttaagtgatgatctctcaaaagtgaccgacttccgcaccgtcttccgccagatgccaaaactgtctaccggcaaccattttggcgggcggctggtattcgacggtaaaggttatctttttattgctctgggcgaaaacaatcagcgcccgacggcgcaggatctggataaattacagggcaaactggtgcgtctgaccgaccagggcgaaatcccggatgataatccttttataaaggaatccggtgcgcgcgccgagatctggtcttatggcattcgtaatccgcaaggaatggcgatgaatccgtggagtaatgcactgtggctgaatgaacatggcccgcgcggtggtgatgaaattaatatcccgcaaaaaggcaaaaactacggctggccgctggcaacctggggaatcaactattcaggctttaagataccggaagcgaaaggggagatcgtcgccgggaccgagcaacctgttttttactggaaagattcgcccgctgtgagcggcatggccttctataacagcgataaattcccccagtggcagcaaaaattatttataggcgcgctgaaagataaagatgtcattgtgatgagcgtcaacggcgacaaagtgacagaagatggccgtattttaacggacagagggcagcgaattcgtgatgttcgctctggacccgacggttatttatacgttctcaccgacgagtccagtggggaattacttaaagttagcccacgcaattagctaacgggaatcatcaccactttgcgcactgcggggcgttcagtgagttgctgataccagcgttgcagatttggacgcggtgtccaggtcaggccaacgttaaacaaattgtagatgaacggtgcgatagcgatatcgcccacaccaaactcgtcgccagagaaccattttacttttgccagttccgcatcgagcagggcaaacagggcgtcgcactctttgcaactggcatcaatggcggcctgatcgcgctcttccggtggtgttctgactaatcccatcaggatcccgcgatgagcattactgagcgtctggtttgcccagtccatccatttttccgcttccgcacgacgtgccggtgagtcgatccacaggcgtttttgcccgtactgtgccgccagatagcggacaatggcgtttgattcccaaagaatgagatcactttcgtcgtcacgcaacaacggcaccagcccgttagggttcatcgccagaaaatcagcatcgtgatttatcccaaactcacggcccgcgagaatttgctcataaggtagttccagttcttcgagcgtcagcaatactttttttacgttggttgaattattccgaccccacagcgtaatcatactcaccccttttccgacaggcagccacaggctgaacaggactccgatggtgaagtaaagttaacttttaagcaacagctggcaaaaaaatgacaccagaagcagcgaagcggcaggatattgcataaactttaaaaactttaccaacttacggtttctttaagtttgtgtgtgcgttattaatcaccgaacttatcatacggcgatataacgtattttttttgaatggatactcgggtggcatttatgacgcaatactcctctctccttcgtggtcttgcagcgggttctgcatttttattcctttttgccccaacggcattcgcggcggaacaaaccgttgaagcgccgagcgtggatgcgcgtgcatggattttaatggattacgccagcggtaaagtgctggcagaaggcaacgcggatgagaaactggatcccgcgagcctgactaaaatcatgaccagctatgtggttgggcaggcgcttaaggccgataagattaaactcaccgatatggtgacggtcggtaaagatgcctgggcgacgggaaatccggcactgcgtggttcatcggtaatgttcctcaaaccgggcgatcaggtttcggtggcagacttgaacaaaggtgtgattatccagtccggtaatgacgcctgtattgcgctggccgattacgttgccgggagccaggagtcattcattggtttgatgaatggttatgccaaaaaactgggtctgaccaacactaccttccagacggtgcacggtctggatgcgccggggcagttcagtaccgcgcgcgatatggcattgctgggtaaagcattgatccacgatgtgccggaagagtacgccattcataaagagaaagagttcaccttcaacaaaattcgtcagcctaaccgtaaccgtctgctgtggagcagcaatctgaatgttgatggcatgaagacaggaaccacggcaggcgcgggatataatctggttgcttcggctacccagggcgatatgcgtttaatctccgtagtgctgggggcgaaaactgaccgtatccgttttaatgagtctgagaaattattgacctggggtttccgcttctttgaaaccgtgacgccaattaaacctgatgccacctttgtgactcagcgcgtctggtttggtgataagagcgaagtgaatcttggggcaggcgaagcgggctcagtgaccataccgcgtgggcagctgaaaaacctgaaggcgagctacacgttaacggaaccgcagcttaccgcaccgctgaaaaaaggtcaggttgtcgggaccattgatttccagcttaacggtaaatccattgagcagcgtccgctgatcgtgatggaaaatgtggaagagggcggattctttggtcggatgtgggatttcgtgatgatgaaattccatcagtggttcggcagctggttctcttaatcttctgataaccggatggcgcgaaacgtcatccggttatacgtcattaatacatcaacttaatacggtgcgtctgcgcgtacttcacatactcatcttccgggcaacaatcactcaccacaatatcaaagcgtttcaggtcacccatgcgcgccggacgcaccttgccaaatttactgtggtcgacaaccagcacatgcttttgcgccatcgacatggcccagtgttttaccggcaactcttcaagattaaaacaggtagcgcctttactgacatgcacgcccgccgcggaataaaaagcgatatccgggcaaaaattattcaacgtttgctgaaaatcgatgggtttgaaaatggcgttgctggcgtgaaattcaccaccgcacagaaatgcgcggcaatggggtttctctttcagcgccagaaaggtatttagcgaataacaaacggcggtaaaagggatttcattatcaatcgcttcaataatccacggcgtggtggtgccacagtcaaaaaagagagtctgatcgggttctaccagtgtcgcagccatttttgccgcccggcgtttttcttccaccaggcgggatttttgatcgcttaacaggtaatggctggcactgcgcggttccagaacaatatagccgccgagcaaaacgacgggcgcactgtggttgttcagatcgcgacgaatcgtcatctccgaaaccccaagcagggcggcggcgtctttaagatgtaacttatcgctgcgttttaattcttgcagcagctgcccgatacgctcttcgcgacgtgtttccataatccctctgaatagttattgaagcgagccgctcaatactacactttttagcagagatcagtcacgcacccagcctttgcggatcggtaatgcaaaacagaagcgataccacgattgcagacgttgatagagtttatgccccatcgcttgccagataatctgagcgctaaggcagccaatcatacctgccagcaatccaccgagcatatccagcggccagtgcacgccaagataaacgcgcgaccaggcaatgacgacggccagcaccattaaaagtgagccggaccacaggcgatgccagcataaaaatgccagtgcaaaggtgaaaatcaccgtaccgtggtcgcttgggaatgagtcatccgccgcatgatgcaggaagttatagccgatattttcgacaaagggtcggtcgtgcggaaaaagatgtcccatcgtccaggacacaaacaggctgaccgccagcgcgatagcgatttttatcaccagttgccgttgtgctgtaagcccccacaaccaaagcaccgcggccagcagcggtaccacggtaatcaaatctttagcaataaaaatcgccaacgagatcatccacggagccgagtctggcgtcgcgttaataagagagaatagagagagattcaaattttccagcataacttcccgacgcaaagtgattaaaagggagccaatacaggcaagtcgttgagaataaagtgcaggttaaactgggtaaagcggcatcgtcttatttccctcaagcggcctgtttacggtgggtaattgtaacgggcataggttaaataaaacttaaagaaagcgtagctatactcgcaataatgtaagaatgtgcttaaccgtggtttcagctacaaaattcgctttctcgttagctgtgcttttattaaactctgcgcgattattattggcgaagaaattgcatgcaaaataaattagcttccggtgccaggcttggacgtcaggcgttacttttccctctctgtctggtgctttacgaattttcaacctatatcggcaacgatatgattcaacccggtatgttggccgtggtggaacaatatcaggcgggcattgattgggttcctacttcaatgaccgcatatctggcgggcgggatgtttttacaatggctcctggggccgctgtcggatcgtattggtcgccgtccggtgatgctggcgggggtggtgtggtttatcatcacctgtctggcaatattactggcgcaaaacattgaacaattcactctgttgcgcttcttgcagggcataagcctctgtttcattggcgctgtgggatacgccgcaattcaggaatccttcgaagaggcggtttgtatcaagatcaccgcgctgatggcgaacgtggcgctgattgctccgctacttggtccgctggtgggcgcggcgtggatccatgtgctgccctgggaagggatgtttgtcttgtttgccgcattggcagcgatctcctttttcggtctgcaacaagccatgcctgaaaccgccacgcgtataggcgagaaactgtcactgaaagaactcggtcgtgactataagctggtgctgaagaacggccgctttgtggcgggggcgctggcgctgggattcgttagcctgccattgctggcgtggatcgcccagtcgccgattatcatcattaccggcgagcagttgagcagctatgaatatggcttgctgcaagtgcctattttcggggcgttaattgcgggtaacttgctgttagcgcgtctgacctcgcgccgcaccgtacgttcgctgattattatgggcggctggccgattattattggtctgttggtcgctgctgcggcaacggttatctcatcgcacgcgtatttatggatgaccgccgggttaagtatttatgctttcggcattggtctggcgaatgcgggactggtgcgattaaccctgtttgccagcgatatgagtaaaggtacggtttctgcggcgatgggaatgctgcaaatgctgatctttaccgttggtattgaaatcagcaaacatgcctggctgaacgggggcaacggacagtttaatctcttcaaccttgtcaacggaattttgtggctgtcgctgatggttatctttttaaaagataaacagatgggaaattctcacgaagggtaaaaaatgcctgattgctttgtgcgatcaggcattctcgaattaatggtgatggtcgtcaatctggtgttcgataaccatcccttcacctacgctggcaagatggcgaacataaggatgcgggcggtaagccggagctggcgcaggagccacatagacggtttgcggcacagtcgcgacgctgaccgcttgtggaacgctgactgaatcaggaaccacaaccactttgtatccactcggcacatcgacggtgacactttgcgccatcgccacaccagtaaagcccattaaaagcgcgcccaacagtagacaatttttcataatcatttcgcctgaaataatgcagcgggttaatttccgcgaattatgcagccttcattcaggtattgtgttgccgggcgtgctgccgtttttattggtcaaatggcgcttcgtgtttaagcactttatcgatcacatccagtacgccttcacggttattggagcctgcccggtattttgccgctgcgacgaccgcgctgccggcattttccattgcaaaactaaagcctgcctgacgcagcatctcaatatcgttaccgccatcgccaaagaccaccacttcgctgtcgtctattccccataatttctgcagttggcgaaggccattggctttatgtacgccggggataatcagatcgatgctgccgttgccggtgtggactggcaccataatatcgccgatggcctcatgtaatgctttttgtacttgtggaatcagttcatcggaaagattcaggccaaacttaaagaaaatatcttctaagttgtcaaagttatcgacgtattccagacggtgataatacatttccgccaccgttttcatggcatcgtcatattttttgagcgtataggcgctattttttccgcaggcaataatttccacttccgggcgcgtcagcaaatgttccacgacagtagtaaaggcatccttcgacagctcgccattaaaaacatctttgccttcactcactacccagccgccgttttcagccacaaaggcaatttcattcgcaatttcagggaagaaagagatcaactgataatattgattcccgctggcgaccacaaagcgaatgccttgtgctttcatttgctgatactgagccataaaccgctcacggttataggttttttgatcgcttaagaaagtaccatccatgtctaccgcaattaatttaatgctcatcaactattctccatcgccgtctgcgttttggtatcgggtttggcgacggctttcgcgacaatagccgcgagaataaccagcgccagtacaaccagcattgcactacgtaatccataatgttcgccgagatagcccagcagcggcggcccgacgaggaaagccagataaccggtcgttgctaccacactgacgcgggttggtgcatcggggccggtatcgctggcggcagaaatggtcagcgggaagcccagcgaggcacccagtccccagagtacaacagacaccccagcgacccaggcgctatcgataaaaataatcagcccaatacccaacgcccccattagtgcactggcccgaaccacggcaacgcgactgtaacggtcgatgaaccaaccgccggtgaagcgtccaacggtcatccccagggtaaaaccggcataaatcagcgagccggaagtagggctaaaaccgtgaccgtcaaccattaataagggtaaccagtcgttggcagaaccttcggcaaaggccatcgccagcaccacaacacctatcagcagcaactggatatcgcgataaaaaggtacgcctttttcgccatgctgggtgccatcggcagcatttttgcccgtaccgtcagggattgcctgaatggcgatataaataggtgcgatacctaccagcgccgccaataaaatgtgcaccgttgccggaacgccaaaggccgtcagtgccatcccgacacctgcgcctgccagcgtgcccaggctataaaaaccgtgcatcatcggcaaaaccgtcttattcatttctcgctcaacggcagcaccttcaacgtttatcgccacttccgcagaaccaaaacttgccccaaagacgccgagaccaacggcaaagagcaggggcgatgtcagccagagtgccagacttaatatcatcatcccgatcaatgcgcaggacatcgtgaccaggatgacattacgcgtgccaaagcgtttcactaaccacgccgagcagagaataccgctcatcgaaccgatcgacagaccaaagagaacaccgcccatttcagcgatcgagacagagagaatatcgcggatagcaggcgtacgggttgcccaggacgccattaacaggcctggcaaaaagaagaacataaacagcgcccaggttcggcgtttcaatgcattacgtgaagaatttacggtcatagatcacgtcaaaataagaagagggaagacaacattagcaaggttgtgtacatttgtacacaattgcagagagaggaaatgacatgcgtcgcgctaacgatccgcaacggcgagaaaaaattatccaggccacgctggaggcggtgaaactttacggaatacatgctgttacgcaccgcaaaattgctacccttgccggggtaccgttgggatcgatgacctactatttttcaggaattgatgagttgttgctggaggcgttcagcagttttactgagattatgtcccggcaatatcaggcatttttagcgatgttagtgatgctcaaggcgcatgccaggctatcaccgatatgatctacagctcacaggttgcaacgccggataatatggagctgatgtaccagctctacgcgctggctagccaaaaaccgctattaaaaacggtaatgcaaaactggatgcagcgcagtcagcaaacgctcgaacaatggtttgaacccggaaccgcccgcgcgcttgatgcgtttattgaggggatgacgctgcattttgtcaccgaccgtaagccgctatcgcgcgaggagattttgaggatggttgagagggttgcagggtagtagataagttttagataacaaaaaacccatcaaccttgaaccgaaatggcggggttgatgggctccacaaaatggggacatcaaagaaaagcagtggcactaattaagactgatgccctgcggaaaagttctgcggttgtgcaaaaaaatttcattttcagggcaacttcagttttatcctaatcctggccataccatgacgatgattgtccctgccagcgtcagcaggacgttggcgattgcgtaggtgcccgcatagcccagcgcagggatgttactgcgagctgtatcactgatgatctccattgccggcgcgcaggtgcgtgcgcccatcattgcgccgaacaacagtgcgcggttcattcgcaatacataagcaccgaacaagaaacagataaccacgggcacaagactgacaattaatccggcaatcaacatctgaccgccaatcgcgcccaggccgttattaataccgctaccggcgctcagaccaacgcctgccataaacaccatcaagccgaactctttcaccatgcttaatgcaccttgcggaatgtaaccgaaggtcgggtggttagcacgcataaagcccagcataattccggcgaataacaacccggcagcgttccccatgccgaaactgaatgtgctgaactggaaggtgatcatcccgatcatcagcccaataacaaagaaggcgcaaaatgccagcaggtcagtgacctggctgtgaatcgagataaagccgatgcgatcggcgatggtttttacgcgacgggcatcaccgctgacttgtaaaacgtcacctttgttaagcacgacgttgtcatctatcggcatctcaatctggctacgaatgacgcggttaaggaagcaaccgtgatcggtcaacttcagttgtgcgagacgtttacctacagcgttatggtttttaacgaccacttcttcagtgacgatacgcatgtcgagaaggtcacgatcgaaaacttctttaccgttacggaagctgggatcgagtcgggcatgggcgtcgggatagcctaccaacgctatttcatcgcccatttgtagcacggcatcaccgtctggatttgccagaatcccgttacgtcgaatacgttcaatgtagcagccggtttgtcgataaatacccagttcacgcagatttttgccgtcggtccaggccaccagctccgggccgacgcgataggcgcggatcaccggtaaataaaccttacggttggcatcagtgtccaggccacgttcgcgggcgatttgctgggcgctggtctgtaagtcctgatgctgcaatttcggcaagtaacgcgcaccaacaatcaaactcaccagaccgattaaataggttaaggcatacccgaggctcagattatccagtgccagtgagagctgcctgctttccatgccggaatgacgcagtgtatcgccagcaccgaccagaaccggtgtcgacgtcatagagcctgctaacataccggccgtcaggccaatatcccagccaaacagcttacctaaccctaaggcgatcaccagcgcactgccaaccatcaccagtgctaacattaggtaatttttcccatcgcgaaaaaaaatggaaaaaaagttcggtccggcttcgaccccgacgcagaaaataaacagcataaagccaagattaagcgcatcggtgttaatgctgaaatgttgttggcctaataacagcgatacgactaaaacgccaatggaattacccagttggatcgaaccaagtcgtaactttccgagacatagcccaagcgcgaggaccacaaataataacagaatgtaattcccatttaacaattcggcgacgtttatattcacggaggctaacttcttgtttactagtaagctgttgaaagaaatggtaatttacgataatgttttttaccagaattcagggcgcagattcattcagcgcacctaaacgatagtaaagtaacaatatattttactagtgtaatcacattaggtatcaacggctatatgaattgcgttggcctatattagcatggaatgcgaagcggctttatcttactgaacgccacactggcgaaaaatgtgttcgatagacgcagtgtcaggaggaacgagtgaaacataaacaacgttgggcgggggcaatctgctgttttgtcctcttcattgtggtgtgcctttttctggcgacgcacatgaaaggcgcttttcgggctgccgggcatcctgaaatcggcttgctatttttcattcttcctggagcagtcgccagcttcttttcacagcgtagagaagtcctgaaacctctgtttggcgcaatgctggcggcaccctgttcgatgctcattatgcggctgtttttttcaccgacgcgctcattctggcaagagctggcatggttactaagcgcggtgttctggtgtgcgctgggggcactgtgtttcttatttatcagtagtttgtttaaaccacagcacagaaaaaatcagtaaagccctcaacgcgagggcttgtcagacgatcaggcgtccagattttctttcacccatgcagcaaaatcggtatagccgccgatatgttgctgatcgacaaaaatctgcggcacggtttctacgggtttacctgccttttgttgtagatcttctttagtgatcccttccgcacgaatatctacatactgatactgaaaatcatcgcgttcattgctcaatttctcagccagatcttttgcacgcacacagtaagggcaacccgaacgaccaaaaataacggtttgcattatttctctcctcatagatttatgcctgtaatgatcacgctaaaatgtattcgctgaaagtaggtttaacctgttgcattaattgctaaaagctataactgttaaacacaatacagtgaaaagttttagactgaaggctcactttgcagagggaagcgtatgcgcgcgatcggtaaattgcctaaaggcgtgttgatactggaatttatcggaatgatgctactggcggtggcgctgctgtcggtaagcgactccctgtcgctgcctgagccattttctcggccagaagtgcagattctgatgatttttctcggtgttttgctcatgcttcccgctgcggtggtggttattcttcaggtggcaaaacgtcttgccccacagctgatgaaccgtccaccgcaatattcacgttcagaaagagaaaaagataatgacgccaaccattgaacttatttgtggccatcgctccattcgccatttcactgatgaacccatttccgacgcgcagtgtgaggcgattattaacagcgcccgtgcgacgtccagttccagttttttgcagtgcagtagcattattcgcattaccgacaaagcgttacgtgaagaactggtgacgctgaccggcgggcaaaaacacgtagcgcaagcggcggagttctgggtgttctgtgccgactttaaccgccatttacagatctgtccggatgctcagctcggcctggcggaacaactgttgctcggtgtcgttgatacggcaatgatggcgcagaatgcattaatcgcagcggaatcgctgggattgggcggggtatatatcggcggcctgcgcaataatattgaagcggtgacgaaactgcttaaattaccgcagcatgttctgccgctgtttgggctgtgccttggctggcctgcggataatccggatcttaagccgcgtttaccggcctccattttggtgcatgaaaacagctatcaaccgctggataaaggcgcactggcgcagtatgacgagcaactggcggaatattacctcacccgtggcagcaataatcgccgggatacctggagcgatcatatccgccgaacaatcattaaagaaagccgcccatttattctggattatttgcacaaacagggttgggcgacgcgctaaaaccgccacgtcgatgtatgatacgcgggcttttgaccaggtctgacagagaggtgcagggtgaaaattgccatattgtcccgggatggaacgctctattcgtgtaagcggctgcgtgaagccgctatacagcgcggtcacctggttgaaattcttgatccgctttcttgctacatgaacataaatcctgcggcgtcttctattcactacaaaggccgcaagttaccccattttgacgcagtgatcccgcgtattggcaccgccattaccttttatgggacggcggcactgcgccagttcgagatgctggggagctatccgctcaatgagtcggtcgccattgcccgggcgcgtgacaaattgcgttccatgcaactgctggcgcgtcagggcatcgacctgcctgtcacgggcattgcgcattcgccggatgataccagcgatttaatcgacatggtcggtggtgcgccgctggtggtcaagttggttgaaggcacgcagggaattggcgtcgtgctggcggagacgcgtcaggcggcggaaagcgtgattgacgctttccgcggtctgaacgcgcatattctggtgcaggaatatatcaaagaggcgcaagggtgcgatatccgctgtctggttgttggcgatgaagtggtcgctgcgattgaacggcgggcgaaagagggcgattttcgttccaatttgcatcgtggcggcgcggcaagcgtcgccagtatcacaccacaggagcgtgaaatcgcgataaaagccgcgcgaacgatggcgctggacgttgctggtgtggatattctgcgtgctaatcgcgggccgttggtgatggaggtgaatgcgtcgccggggctggaaggaatagaaaaaaccaccggtatcgacatcgcgggtaaaatgatccgctggatcgaacgccacgctacgacagaatattgcctgaaaacgggtggttagtcgcaatcacattactgatcatggttttgcctgcgctttttgcgtaagctgtgccggtctttttatcgaaagaggttgtacaaaattatgacatcgctggtcgttcctggtctggatacgctgcgtcaatggctcgatgacctggggatgagtttttttgaatgtgataactgtcaggctctgcatctgccccatatgcagaatttcgacggtgtctttgatgccaaaatcgatctgatcgataacacgatcctgttttctgccatggcggaagtccgaccttcagccgtattgccgctggcggcggatttatctgccatcaatgccagttcgctgaccgtgaaagcatttcttgatatgcaggatgataatctgccaaagctggtggtttgccagtctttatccgttatgcagggcgtaacctatgagcagtttgcatggttcgtgcgtcagagcgaagagcagatttcgatggtcattcttgaagctaatgcccatcaactgctgttaccgactgacgatgaagggcaaaacaacgttaccgaaaactattttctccactgataattcctttcgagcacgcagtcgctgccgcagtgactgcgcgctgcaaaattatctgctgtttttaaccttttcttaaagattatttcacttatcttgtgtcgatttggctttatcacatagagcaaatacgcataaaaatttgttaaataccgttttttaatccgagctatagtctcaaaccctggctaaagttattcttgcgatgcttttatatagcgagcagtgctggccgggagagagttctcttttcttacaccgcgccgataaaaaaatatgcacttttattgcatatctttcagtgtgacaacttttgttcgtttgttaacgaactttcagaaggaaagagatatgaccgccttaaataaaaaatggctatcgggtctggttgcgggtgctctgatggccgtctctgtcggcacgctcgcggctgaacaaaaaacactccacatttataactggtctgattatatcgcccctgacacggtggccaattttgaaaaagaaaccggtattaaagtcgtctacgatgttttcgactctaacgaagtactggaaggcaaattaatggcgggtagcaccggctttgacttggtggttccatctgccagctttcttgaacgccagctgacagcgggagttttccagccgctggacaaaagcaaattgccggagtggaagaatctcgatccggagctgctgaagttggtcgccaaacacgatcccgacaataaatttgctatgccctatatgtgggcgacgaccgggattggctataacgttgataaagttaaagctgtgctgggcgaaaacgcgcccgtcgatagctgggacttgatcctcaagcctgaaaatctggaaaaactgaaaagctgcggtgtctctttcctggatgcgccagaagaagtttttgctaccgtgctgaattatctcggcaaagatcccaacagcactaaagcggatgattacaccggaccggctaccgatctgctgttaaagctgcgcccgaacattcgttatttccattcatctcaatacattaacgacctggcaaacggcgatatctgcgtcgctattggctgggcgggcgatgtctggcaggcgtcaaaccgcgcgaaggaagcgaagaatggcgttaatgtctcgttctcgattccaaaagaaggggcgatggcgttctttgatgtattcgccatgcctgcggatgccaaaaacaaagacgaagcctatcagttcctgaattacctgctgcgcccggatgtagtagcgcatatttccgaccatgtgttctatgccaacgccaataaagcagccacgccgctggtgagtgcggaagtccgtgagaacccgggtatttatccgcctgcggatgttcgtgcgaagctgttcactctgaaagtgcaggacccgaaaatcgaccgtgtgcgcacccgcgcgtggaccaaagtgaagagcggaaaataatccgcagccttagatgccgggcgggcgcaccacacccgccggcaattcgcaccatcatggtgcgcttgcacacattcaatgccggagagcagccgtgaatgacgctatccctcgcccgcaggcgaaaacccgtaaggcgctgacgccgctattagaaatccgcaacctcaccaaatcctacgatggtcaacatgcggtggatgatgtcagcctgaccatctacaaaggtgaaatcttcgcgctgctgggcgcatccggctgtggcaagtccacgctgctgcgtatgctggcaggtttcgaacaaccttctgccggacagataatgcttgatggcgtcgatttgtcacaggtgccgccttacctgcgccccatcaatatgatgtttcagtcttacgcgctgtttccgcatatgaccgtggaacagaacatcgcttttggcctgaaacaggacaaactaccgaaagcggaaattgccagtcgggtccatgagatgctcggcctggtgcacatgcaggagttcgccaaacgcaaaccgcatcagctttccggtggtcagcgacagcgtgtggccctggcccgaagccttgccaaacgcccgaaactattactgctcgatgagccgatgggcgcgctggataaaaagctgcgtgaccggatgcagcttgaagtggtggatattctggagcgcgtcggtgtgacttgtgtgatggtcacccacgatcaggaagaggcgatgaccatggcggggcgtatcgccattatgaatcgcgggaaatttgtccagattggcgagccggaagagatctacgagcatccaactacccgctacagcgctgaatttatcggttcggttaatgtctttgaaggtgtactcaaagagcgtcaggaagatggcctggtgcttgattcgccggggctggtgcatccactgaaagtcgatgcggatgcttcagtggtcgataacgtgccggtacacgtagcgctgcgcccggaaaaaatcatgctttgcgaagagccgcccgccaatggttgtaacttcgcggtgggggaggtgatacacattgcctatctcggcgatctttcggtgtatcacgttcgtctgaaaagtgggcagatgattagcgcccagctacaaaacgcccatcgtcatcgtaaagggttaccgacctggggcgacgaagtgcgtttgtgctgggaagtggacagctgtgtggtgctgacggtttaaggagcaaagatgaatacacttgaacctgctgcccagtcgaaaccgccgggcggatttaagctgtggttgtcgcagctgcaaatgaagcatgggcgcaaactggtcattgcgttgccatatatctggttgatcttgctgtttctgctgccatttctgattgtctttaaaataagcctggcggagatggcgcgcgctattccaccttataccgaactgatggagtgggctgacgggcaactgtccatcactcttaatctcggtaattttctgcaactgaccgacgatccgctctatttcgatgcttatctccagtcgctacaggtggctgcgatttcgacattttgctgtttactgatcggctatccgctggcgtgggcggtggcgcacagtaagccttcgacccgtaatattttattactactggtgatcctgccgtcgtggacctcgtttctgatccgcgtttatgcctggatgggaatattaaaaaacaacggtgtgctgaataattttctgctgtggctgggggttatcgatcaaccgctgaccattcttcataccaatctggcagtttatattggcattgtttacgcctacgtgccgtttatggtactgccgatttataccgcgttgattcgtattgattattcgctggtggaagcagcgctggatctcggtgcacgaccgctgaaaacgttctttactgtgatcgtgccgctgactaaaggtgggattattgccggatcgatgctggtgtttatcccggctgtgggcgagtttgtgatcccggaactgctcggtggcccggacagcatcatgatcgggcgcgtgctatggcaagagtttttcaataaccgcgactggccggtggcctcggcggtagcgatcatcatgttgctgctgctaattgtgccgataatgtggttccacaaacaccagcaaaaaagcgtgggagaacacggatgaataatttaccggtagttcgttcaccctggcggattgtgattttgctgctgggctttacctttctctacgcgccaatgctgatgctggttatctattcgtttaacagctcgaagctggtgacggtgtgggccggctggtcaacgcgctggtatggtgagttattgcgcgatgacgcgatgatgagtgcggttggtttaagcctgacaattgctgcctgtgcggcaacggcggcggcgatcctcgggactattgcggcggtggtgctggtgcgctttggcagatttcgcggatcaaatggctttgcctttatgatcaccgcgccgctggtgatgccagatgtcatcacgggcttgtcgctgttgttattattcgtcgcgcttgctcatgccattggctggcctgcggaccgcggtatgctcaccatctggctggcgcatgtcactttttgtacggcttatgtggcggtcgttatttcttcaagattgcgggaactggatcgctcgatagaagaagcagcgatggatctcggtgcgacgccgctgaaagtgtttttcgtcattacgctaccgatgatcatgcccgcgatcatttctggctggttactggcttttactttgtcgcttgatgatctggtgatcgccagctttgtttccgggccgggagccaccacgttaccgatgctggtcttttccagcgtgcggatgggggtgaatccggaaatcaacgcccttgcaacgttaattctcggtgcggtcggaattgtcggatttatcgcctggtatctgatggctcgcgcagaaaaacagcggatacgcgatatccagcgtgcaagacatggctgaagacactaaaatttgccaacctggctacataatgccgcgcatgccgcggcattgttttcatggaagacgaaacgttgggattttttaagaaaacatcttcatctcatgctcgcctgaatgtgcctgcgctggtgcaggtggcggcgctcgccattattatgatccgtggcctcgacgtgctgatgattttcaatacgctgggcgtgcgcggtattggcgagttcattcatcgcagcgtacaaacctggagtttaacgctggtctttttaagcagtctggtgctggttttcattgagatctggtgtgcgttttcactggtgaaagggcgtcgctgggcgcgctggctatatctgctgacacaaatcaccgccgcaagttacttgtgggcggcttcgctggggtacggttatccggagctgttcagcattcccggtgaatcaaaacgtgaaatcttccatagcctgatgctgcagaagctgccggatatgctcatcctgatgctgctgttcgttccctcgaccagtcggcggttcttccagttgcaataatgtgtataatcgtcgcccctgatgatgtgaaggtcaatgtatgcagtgcgcactttacgacgcgggtcgctgtcgttcctgtcagtggataacgcagccgattccagagcaactctccgctaaaaccgccgatcttaaaaatctgctcgccgattttccggttgaggaatggtgcgcgccggtgtcaggcccggaacaagggtttcgtaataaagccaaaatggtggtgagtggtagcgttgaaaaaccactgctcggtatgctgcatcgcgacggcacaccagaagacctttgtgactgcccgctttatcctgcctcatttgcgcccgtttttgcggcgctaaaaccgtttatcgcccgtgcggggctgacaccctacaacgtggcgcgtaagcgtggcgaactgaaatacattctgctgactgaaagccagagcgatggcggcatgatgctgcgctttgtactgcgttctgaaaccaaactggcacaactgcgtaaggcgctgccgtggttacaggaacaactaccgcaactgaaagttattaccgtcaatattcagccggtacatatggcgattatggaaggggagacggagatctaccttactgaacaacaggcgctggcagagcgttttaatgacgtaccgctgtggatccgtccgcaaagtttcttccagactaatccggcggtcgccagccagctgtacgctaccgcgcgcgactgggtacggcagctgccagttaaacatatgtgggatctgttctgcggtgtgggtggctttggtttacactgcgcgacgcctgacatgcagttaaccgggatcgaaattgcatcagaggccattgcctgtgcaaagcagtcagccgctgaactgggcttaacgcgtttgcaatttcaggcgctggactccactcagtttgccaccgctcagggggaggtgccggagctggtgctggttaatccgccgcgccgcggcattggtaaaccgctatgtgattatctctcaacaatggcaccgcgttttattatctactccagctgtaacgcccaaaccatggcgaaagatatccgcgaactgccaggttaccgcatcgaacgggtacagctttttgatatgttcccgcacaccgcgcactatgaagtgctgacgctgctggtgaagcaataaaaaagccgcaggtgcggcttcagattgctgatcaggtgcgctttgttcatgccggatgcggcgtgtacgccttatccggcctacaaaatcatgctaaatcaatacattgcagagttgatgtgggccggataagcgcagcgcatcaggcaatcttacttttgtcatcagtctcaattactgcggaaaccactggtcattgattttctgatatgtaccgtcagctttaattgctgccagcgcgttattcagtttttccagcagagctttgttatccggacgtacagcgatgcccagaccggtgccgaagtattgcggatcggtcactttttcagtagcaacgcccagttgcggattggttttcagccattcgtttaccaccgctgtgtcaccaaataccccatcaatacgaccatttttcagatcgataaaggcattctgataactgtcataggagacagttttcacttcggggtgctgatcctgaatatatttctggtgcgtggtgccgttttccatcccaatacgtttgcctttcagatcggcaaacgttttgtaggtatcttttttggcaatcacgacggctgagttttcatagtagggcgtggtaaacgatacctgcttgctacgctcgggcgtgatatccataccggagattacggcgtcatattttctgaatttcagtgacgggatcaggctgtcgaacgcgtgattagtaaaagtacattctgcctgcatttgtttgcacaaggcttttgccagatcgatatcaaagccgacaatctcattattagcacctatagattcaaagggtggataggtggctgaaacgccaaaattgattttctctgcggcagaagcaccgaaagtaaaggaagcaagtaaagcggcaagaactaactttttcatgatggaactcccgtctgtcaatcttatgatttttggccgtgtctgcggcatgggataacaatgccatcaagtgaatttatatgcaataaatatgattaaataatttaaatgaaataaaaaaagacggataccttagtgagttgtccgtcttcattataagaatttatgcactatgtaggccggataaggcgtccacgccgcatccggcacaggcaccgtgctgatgtctgatgcgacgctggcgcgtcttatcagacctacaaacccccccggcgaatgtacgcagctacattaatttcgccgttcgaatgccagtgctttgcgctcgatcagacgcatcatcagcgtcagcaggccgttgacgaccaggtaaataatccctgccgcaccgaacaccattacatcgtaggtgcgtccgtacaacaactggctgtatcccatcacttccatcagcgtaatggtgtaagccagagaggtacttttgaacaccagcaccacttcgttggaataagaagagagcgagcgtttaaaggcatacggcagcaggatcgccagcgtatcttttttgctcattcccagggcgctacaggactgccactgaccttctgggatcgcacgaattgcaccgtaaaacagctgcgtggtatacgccgcactgttcagcgataacgcaatcagcgcacataaccacggttctgacaacaaatgccacagtgccggatactcctgcaaagtcggaaactggcccggcccgtaataaatcaggaagatctgcaccagcagcggcgtaccggtaaacagcgtgatataaccccgcaccagccacaccagcaccggcgttttcagcgtcaggatgatggtaaaaatcaatgccagaatcagtgccacaatcagcgaggcaacggttagcgtcaggctggtgtgtagccctttcatcagttcgggtaaatactcaaacattagctgggcctccgctcaaaacgtgtcgcgcgcaggtcaatgcgtttgagaatgtactgactgagcagggtgatcaccaggtaaatcgccgccgccacaatgtaccaggtaaatggttcctgggtacgagtagcgatgctttttgtttgcagcattaaatcattcacactaatcaaactgaccagcgcggtatctttcagcagcaccagccactggttaccgaggccaggcagcgcatgacgccacatctgcggcatcaccagacggaaaaagatagccgatttcgacagccccagcgcctgaccagactcccactgacccaccggcaccgctttcaacgcgccccgaagcgtttgcgaggcataggcggcatacagcagtgacagagcgatgacaccacaaaggaacgggctaacgtcgaagttctcaatgtccatctgcactgggatctgcacgaacccaagattgatagtgaagccatccgaaagcgtcagcagcagctgcgaggagccaaaatagataaacagcaccaccagaatttctggcaggccacgcagaatggttaccagcgctgaacctgcccacgcgacaggacgccattttgccgactcccataccgcaaagaacatcgccagcgccagcccgacaatcaatgcacaaacggcaaggccgacggtcatcccggcggcgcttgctaaaggaaaaaattcattcatcaggaattacttctggaaccatttgttgtagatggtttcgtaagtgccatctttcttcactttttccagcgcagtgttgagtttctgctgcagctcagtgttgccctgacgtaccgcgatgccgaggccagtgccgaagtaatctttatcggtcactttgtcgcccaccgccgccagtttcgggttatctttcagccactcagtgaccactgcggtgtcaccgaagacgccgtcgatacgcccgttttgcagatccagttttgcgttctggtagctgtcatacggaacggtagtgatttccgggtgcttatccataatgaatttctggtgtgtcgtcccgttctgaacgccgactttttgcctttcagctgatcaacactggtgtatttgccttgctgacccacaaacagggcagagttgtcatagtacggggtggtaaacagtacctgcttttcacgctccggagtgatatccatgcccgccatcactgcttctacgcgacggaatttcaggcttgggatcaggctgtcaaacgcctggttagagaaagtacaggttgcatcaatctctttacacagtgcctgtgccaggtcgacgtcaaaaccaacgatctggttgtttgcatcaatcgattcaaacggaggataggaggcttcggtagcaaaacgaatggtttcggcagctgtggcggaaagactaaaacctgcaattaacgcggcaatcagaacttttttcattgttgttatcccgaatcttagtgagagagatagtttttaaatgcttcggtttgcggctcggtaaagcagctcgcgtcgccttgttctacgatatgaccattttccatatacaccactcggctggcggttttacgcgccacttcaacttcgtgggtgacgatcacctgggtaatattcgtttctgccagctcacgaatgatgctgacgatttgtgccgtaatttccgggtccagtgcggcggtcggttcatcgaacagcagtacctgcggttccatcatcaacgcacgggcaatagcaacacgctgctgctgaccaccagaaagatgcagcgggtaacgatcgctataaggtttgagacgcagacgttccagcagtttttctgcacgggccagcgcctgatctttactcaaccccagtacacggcagggcgcttcaatcaggttttgctgcacggtcagatgcggccacaggttgtattgctgaaacaccatgccaacgttacgacgcaaatcgcgaatcgctttgtcagagggtgttttggtgaaatcgaaatggttgcctgcaatgttgagcgtaccggagcgcggcatctcaagcagattgagtacacgcagcagcgagcttttacccgcgccgctggggccaagtaacaccagcgtttcgccctgtgggcaatccagcgtgatatcgaacagcgcctgatgcgcgccgtagaagcaattaatgccgtttaattgaatactcattgacactcgtatactggcagtctgatagctattgaggtcgaagatagtacctttgacagaataattatgcaatatttctgctttaaaagttaaaagcaaagcgcattattcaataaacatagcacaaaataacgggggcggtggtcggcgagcataaatgtcggcattcctcacgaaatgccggacaatttacggggtttattggttgatcaaggcgttagcgattctcgatggactgacggagcgtacccgccgtggcatgaacgctaccgcctaagtaacgcacatcgtcgatgacccaacactggccttcctgaatcattaacacttcatcctgccaaccctggtcaccctgtttgagatccacgcgcaatggaatgttacgggcatcacgattagggatagtcgatgcactggcaacgtgggcgctatctggcaaggtggttcgactggagaatggatcgttggtcagtagttcccgatggttattatcccgggaggcatcgctaagcagtgtcgccagtttgtcgctcagataagggcgcaaggcggtgatgtcgttgctgcggtgcaaaatgcggtagtcataaaattgctgggccacgttatccgggcctccttcaacgcaaggaccactgcgtgtgccgttatctttataagctggagtgactgtggtgcaggcactgaggagcagtgcgcaggggataagcattgtcaatttgctgtagcgcataatgatttccttataagcgatcgctctgaaagcgttctacgataataatgatatcctttcaataatagcgtatcagtctgataatgcttttgagatcgaaggcttagcaaacaaggagatcgatcatgcaattttctacaaccccaactctggaaggccagaccatcgttgaatattgcggtgtggtgaccggcgaagcgattttaggtgccaatattttccgtgatttctttgccggtatccgcgatatcgttggcggacgttccggtgcgtatgaaaaagaactgcgtaaagcacgggagatcgcctttgaggaattaggctcccaggcgcgggcgctgggggccgatgccgtcgtcggtattgatatcgactacgaaacggtcgggcaaaacggcagtatgctgatggttagcgtcagcggtacggcggtgaaaacgcgtcgatgagaagagtcttctggctggtcgctgccgctctgttattggcagggtgtgcaggcgaaaaaggcattgtcgagaaagagggatatcagcttgatacccgacgccaggcgcaggcggcgtatccgcgcattaaagtgctggtgatccactacaccgcagatgattttgatagctcgctggcgacactgaccgataagcaggtcagctcgcattatctggtccctgcggtaccaccgcgatacaacggtaaaccgcgcatctggcaactggtgtcggaacaagaactggcctggcatgcggggattagcgcctggcgcggggcaacgcgccttaacgacacctctattggcattgagctggaaaaccgtggctggcaaaaatcggccggagtgaaatattttgccccgtttgaaccggcacagattcaggcgcttattccactggcgaaagatattattgcccgttatcacatcaagccggaaaacgtagtggcacatgcggatatcgcaccgcagcgcaaagacgatccggggccattatttccctggcagcaactggcgcagcaggggattggtgcctggccggatgcgcagcgggttaacttttaccttgccgggcgcgcgccgcacacaccggtagataccgcgtcattgctggagcttttggcgcgctacggttatgacgttaaacctgatatgacaccgcgcgagcagcggcgcgtgattatggcattccagatgcatttccgcccgacgttatataacggcgaagcggatgcagaaactcaggcgattgccgaagcattgctggagaaatacgggcaggattagcgcggcagttttccgtggtcgcgtagccaggcggcagttttctcgataccttcatccagggtgatgaccggctgataacctaactcttcctgcgcacgcgtaatatccagcgtaaagtcaaaattcaacttggagacgccgtagtgggtcagcggcggctcttttgctgacttgcggcctaaacgctccatgctgcgggcgatcatatccagcatcgggtaggggacggaacgaatacgacagtcaatattcaactcgtcgatcagcttctgcacgatgctgcgcagtgtgcgatgctcgccgttggtgatgttgtacacacgcccggaaggtagcttatcgcaggcttcctggcttgccagccacattgcgtgcacggcattttcatagtaggtcatatcgaccagcgcactgccgccatgcggtaacagaatactgccgtagtggtgcatcatatgcgccagacggggaataaagactttatcgtgcggtccgaacagactttgtgggcgcagaatagtaaagcgcgtttgtggattcgcctgcgaaagcatattgatcacttcttcgctggctgctttgctgcgggcaaactcgttggcgaagcggtgagggcgaaaatcttctttaatatcgcgatggtggtgataatcgaagtacagggagggggaagagatatgaataaagttacgcacaccccaggcgacagcccattcacccaggcggcgagtggcgcgaacgttagccagatcgaaagcctgttgtgtcccccagggtgaggtaaagctggagcagtgccacagcgtatcaatgcccgcgagcatcactttagcttgtgatgaaaccagctcggtcagatccgccggaacaaactctgcgcccattttttccagcaatttgcccattgcctcgttgcgaccggtcgctcgcacgctgatgcctttctggcataaaaactctaccgcgtttcgacctaagccgctggtggcgccggtaaccagtaccttcatatcaatccactgttgttgagaaaataacgtgcgcattcttccgtgatttcccccatgatgcaatgggaaacatgaaagaataacgcaggttttgtcgattaatctgtgctttgttctgccagtctggcgatttgttttgccattccgcgaaaaataaacagatgcgcggggatcatcaataaccagtaaaacagccccggcataccgtgcggatgccagaaagcgcggacatcgatagtacgatagtcgcctttatcttccaggctaaaacacagtcgtcccagccccggcgctttcatgccaaataacaacgtaagttgtttttccggttcaacgacaatcactttccagctatctaccgcatcgccagtctgtaaatattcgcgctccgggcggcctttcgccagcttatgaccgatcgcgcggtccatcaacgcccgtgtctgccacaaaatattgccaaagaaataacgctctttaccgccgatttggttcactacctgccataaagcagcaaggctggcggacgttttaacggtaaaccccgcctgtttggcaaaataaccgtactccggtcgccagcgggcaaaggcctgagcgtcgtagccccagtcgctggagttgaccagtttttcctcctctttcaacgtgctacgtaccgcgtcatcgaaagcgatcagccgttgtgggatgagtgcacgtagcgcggtatcatccgccagcagatcgtgtttcagcccctgaatcaacgccctggcggtggtgggcggtacggaagtaatcacattgagaaaccacaccgaaatccagcgggtggggagggggatggggatcaaccagcggcgcttaccgctcaccgccataaaatgttcaaactgttgctgataactgagcacctctggtccggcggcttcgaagatgcggtgttcgctggccggatgatctaacaacgccaccagatagtgcagcaagttttccagcgcgatgggcgtggtgcgtgaacgtacccagcgtggcggcgttaacactggcaggttgtagaccatatcgcgcatgacttcgaacgccgctgaacctgcgccaacgataattccggcccgaagttcggtcacaggtacattcgcttcacgaagaatgtccgccgtagcctgacgagcacgcagatgatccgactgctcatgtggcggggcctgcaacgaactgagaaagattaattgcttaactggtacttcacgtagcgcatcgcggacgttgagagccacctggcgctcctgagcgataaaatcgccgccttcgcccatgctgtgcaccagaaaatagacggtatcgatatcctgcaacagggccggaaggttatccggccagctgagatcgactttatggcaactgacgtttgccagttgcagctttgcaagcctgtcgacatgacgtgccgccgccaggatctgatgcccttgctggctgagtgtgcgcaccagatgctgaccaatgtagccactggcaccgagaactaaaatgcgttgcggcacgtctctctccttaacgcgccaggaatgcgcgccagtgggcggcgacttccgccagttgttcgcgcgagacgtcaagatgcgtcaccaggcggacaatcggcgaggcgttaatcagcacgtttctcgctttcatgtattcgcctaacgcggcagcattttcttccccgacgcgaacaaacagcatattagtgtcctgacgcatcacatccgcgcctgcttcacgcagttgctccgccatccaggcggcgttgtcgtgatcttcctgcaaccgtgcgacgttatttttcagggcatacatcccggcggcagccagaatcccggactgacgcatcccgccaccggccattttccgccagcggatggcacgtttaatgtaatcacgattaccgacgagtaatgaaccgactggcgtcccaagacctttcgacaggcaaatggtgaacgaatcacaatattgcgtgatctctttcagttcgcagccgtaagccaccacggcattaaagatgcgcgcaccgtcaacatgcagcgccagattgcgctcgcgggtaaattcccatgcttctttcaggtattcacgcggcagcactttgccgttgtgggtgttttccagactgagtaatttggtgcgggcgaaatggatatcgtcgggtttgattttcatcgccactttatccagcggtagcgtgccgtcggcagccgcgtcgatgggttgcggctgaatactgcccagcaccgctgcgccaccggcttcaaacagatagttatgcgcggcctgaccgacaatatactcttcgccacgttcgcagtgactgagcagagcgaccaggttggcctgagtgccggtaggcagaaaaatggcggcttctttaccggaaagctctgctgcatagtcctgcagagcattaacggtagggtcgtctccgtaaacgtcgtccccaaccggggcggccatcatcgcttcgagcatggcgcggctcggtcgggtaacggtatcactgcgtaaatcaatcatggcatgtccttattatgacgggaaatgccaccctttttaccttagccagttcgttttcgccagttcgatcacttcatcgccgcgtccgctgatgattgcgcgcaacatatacaagctaaatcctttggcctgttcgagtttgatctgcggtggaatggctaactcttctttggcgaccaccacatccaccaacaccggaccgtcgatagagaaggcgcgttgcagggcttcatcaacttcagacgctttttctacacggatacccgtaatgccgcacgcttcggcaatgcgggcaaagtttgtgtcgtgtagttcggtgccgtcagtcaaatagccaccagctttcatctccatcgccacaaagcccagcacgctgttgttaaagacgacaattttcactggcagtttcatctgcactactgagaggaaatcgcccatcaacatgctaaaaccgccatcgccgcacatggcgaccacctgacgttctggctctgtcgcctgcgcacccagcgcctgcggcatggcgttagccatcgaaccgtggttaaacgaacctaacaggcgacgcttgccgttcattttcagataacgtgccgcccataccgttggcgtgccgacgtcacaggtaaagatggcgtcatcggcggcaaaatgactaatttgttgcgccagatattgcgggtgaatggctttctcgctcggtttagctaaatcgtccagccctttgcgggcgtcgcggtaatcttccagcgctttatccagaaacttgcgatcggttttttcttccaccagtggcagcaatgcccgcagggttgatttgatatcgccgaccagcgccatatccaccttgctgtgagcgccgatgctggctgggttgatatcaatctgaatgattttagcatcggtcgggtagaaggcgcggtagggaaattgcgtgccgagcagcactaacgtatcggcattcatcatggtatggaaacctgacgagaagccgattaatcccgtcattccgacatcatacggattatcgtattcggcatgctctttaccgcgcagggcatgaacaataggcgctttaattttcccggcaaactcaactaactctttatgcgctcccgcgcagccgctgccacacatcagggcgatattgctggaataacgcagcagttgcgccagtttgcgtaactcttcttcttccggcgtcacgactggctgtggcgcatgataccagtgggtagttgccccttctggcgcaggttttaacgccacgtcgcctggtaacacgacaaccgaaacgccacggttaagcaccgctttgcgcatggcaatcgccagtacttgtgggatctgctccgggctggaaaccagctcgcaatagtggctacattcgcggaataactcttgcgggtgggtttcctggaaatagccgctgccaatttcgctggagggaatatgagcggcaatagccagtaccggaacgtgattgcggtggcaatcgaagaggccgttgattaagtgcaggttgccggggccgcacgatccggcacagaccgccagttctcctgaaagttgtgcttcagcgccagcggcaaacgccgccacttcttcatggcgggtggacatccactcgatggtgcccatgcgattaagactgtcactaagaccgttcagagagtcgcctgtgactccccagatgcgtttcacgcctgccgattcgagtgttttggcgatataagctgcaaccgtttgtttcatggttctccatctcctgaatgtgataacggtaacaagtttagttcatctgacggagggggaagggatgggagagaaaggaggcactaacggttaaatagcccgatgacaggaatatcatcgggcataaggcgattatgcgagaaccaaatccccctgcggatggcaggagcaggccagtacgtaaccttcagcgatttcggcgtcggtcagcgtcattgtgctgctcaccgtatattcaccggaaaccactttcgtcttacagcagccgcaaacacccgcacggcaggcagcgacaaccggaacgttattgctttccaacgcctccagtagcgtggtgccaaccggggcgtaaaattctcgtgccggttgcagtttggtgaatttcagaccgctggtcgccgcttccgctactggggtgaagaatttctctttaaagaaacgcgtcacgccgagcgctttcacttcctgctctacccaatccatatacggagccgggccgcaggtcatcacggtacgtgaagctaagtcaggaacgcgagtcagcagttcgcgagtgagacgaccagcgataaagccttcggtaacgttattttccgccaccagcgttaccggatagttacgccactcatcggcgaaaataacatcctgcggcgtacgcacgttgtagatcacctgtacatcggcctgtggacgattcttcgccagccagcgacgcatcgacataatcggcgtgacgccgcagcctgccgccagcagcaggaatttatcttctgctttatcgtcgcaggtaaattcccccatcgcgtccgaaagccagagataatcaccgcgttttacatcgcgcgtcagccactgggagccgacaccgtcatcaatccgccgcacggtcagggtgatgtattcactcacgcctggcgtggaggaaatggtgtaagcacgcagcgtttccgctgagtttcgtacgctgaccagcgcatattgcccggcgcgatatgggtagtaatcgtggcaaatcagggaaatcgtccacacatccggcgtttcttgcgtaatgtgatgaacctgcatccgccacgggcattgattcgttggcatcgtcatcgacaaactccttacgcgctcaacagttgcttcatgtcttcttcaacagtggtgatagaacgcaggccgaatttctcgttcagcaccgccagcaggtctggtgtcaggaaaccaggtgcagtcgggccggtgacgatatttttcacgcccagagaaagcagcgtcagcagaatgacgatcgctttctgttcaaaccaggagagcaccagcgacagcggcagatcgttgacaccgcagcccagtttctctgccagagtgacagccagaataatcgctgagtaagcatcgttacattgacctgcatctaccagacgcggcagaccttcgatatcgccaaactcaagtttgttaaagcgatatttaccacaggcgagggtcaggatcaggcagtcatccggcacgctggtggcgaaatcggtgaagtagtggcgctcgccgcgtgcgccgtcacagccaccaagcaggaagatatgacgcagtttttcacggctcaccagatcaatcagcgtatccgctgcgccaagcagcgtctggcggccaaagcccacggtgatcaggtgcggaatttcgctgtacgggaagcccgccatttgttgcgcctgggcgatgaccgcagaaaaatcttcgccatccagatgacgcacacccggccagccaacgatgctgcgggtccagatacgatcgtcataagcgcctacggttgggtcgatgatgcagttcgaggtcatcacgatggggccagggaaacgagcgaactccacttgctgattctgccagccgctgccgtagttaccgaccagatgcttgaatttacgcagctccgggtagccatgcgcaggcagcatttcgccgtgggtgtaaacattaacgcccgtgccttcggtctgttccagcaggttgtagagatctttgagatcgtgaccggaaatcaggatgcatttacccgccgtcgctttgacgttgacctgggttggcgtcgggtgtccgtatttaccggtttcgcctgcatccagaatgctcatcactttgaagttcatctggccgatttccattgaacactcaagaagcgcgttcatatcggcaggccaggtccccagccacgccatgattttatgatactgggcataaatatcgttgtcgtattgaccgagaacatgcgcgtgttccatataggccgccgcacctttcaggccatacaggcacagcagacgcaggccgagaatgttttcgccaatcgccgctttatctttgttaggggtaaattctgctgcctggcgttgcagctcgccgagatcgtcgctcaccagttgcaggtcagccatcgggttatcgacgcgcgcgttggcatctacagccaggcattgcgctttcagcgcctcgcgcagggcaatcgcttcacgagcgtagccgacaatacgcggagaatcgaagttaacgttggtcagggttgagaaaaaggcacgtggcgcgaagctgtcaacatcgtggttgatgatgccgtattcacgcgcttttaccgcccaggcagaaagcccttgcagcgccgcgatgagtaaatcctgaaggtcagaagtttccgccgttttaccacacatcccctgcgcgtatgagcagccgtttcctgccggagtacggatagtttgttcacattgcacacaaaacatgatcacaccttttaaagttatatttaatatacatgtttaaggttaagacgcttaacgcggggataaaagggatttttcatgcaactttaagggagattgatttagcgcaattttggcggcagggatctaccgccagagaggtattacgcagagaaaaaggcgatgaggatcggcactaacaggctaagaataaaaccgtgaacaattgccgccgggaccatatccagcccgccagtacgttgaagaacgggcagggtgaaatccattgatgtggcaccgcataagcccagtgcagtagagcggctgcggcgaatcagcccagggatcaacataatagcaatcagttcacgggccagatcattaaaaaacgccgcgctcccgattaccggaccaaaagattcggtcaataaaataccggaaagagaataccagccgaaaccggaggccattgccagcgcggtattgatggggagatcaagaataaaggcgttaattaaaccaccaattaatgaactgacaaccaccaccacggcgacaatcattccccggcgattaaggacaatctgctttaaggtcatgccattattgcgcaactgaataccaacgaggaaaagtagcaaaattaacgtgtattcactggcttcggtcgcgtgttgtaagaaagccagtccactcagaccaatggcaaaaccaatcactactacgccgcacagttttagcgactccagcgccatcgcaatacgcgacgggagtttttcttgctgatggtggttgcgccacggcaggcctcgctccagccacatcagggcggcaatattacacagtaaaataacggtaatactgacggcagaataatgcagaatcgccaacaggttactggcgaggttatcgagaaacgccagactgatacccataaaaaagagaataaggtaaaccatccagcttaatagctgattaataacttttaacgcagcttgttggcgaagcggaatgaggtaacccacaatcaggggaaccagaatgattaacagcccagaaaacatgaaaatccagtccttgcaaagatgaagtcgaaatgcgcgatgacacactactgaaagcggaaggacgagtaaagttgcaattaaaaggaaatgttatgcataaggagcagtagagtattcgttttcatttaaagatattcttgcgctttaattacaaactgcaccgatgttggtggcgttaaaatcgccgaggcgttccctgaaggccggggcagcccacatggatgtgggctgagggcgcgttttacagggatgttacctcgcgcccgacccggtagccgtaagggataagtcgagggcaccgcgcagcggcgattttgttcgccagagcccgggggtgcatggggcggcggcgattggccgccccctgcgcgctccttgcgccagtggcaatatgtggcttagctcatgaaaggagcgcaacaagatgatgaatcaacatataacaacatcttaaaaaaaggcctgacattacgccaggccttctgcgttaattaatcacgcttttccagcagggtccggtaaatcagaccaccgataatgccgccgacaattggcaccacccagaagaaccacagttgttctaatgcccagccgccctggaagatagcaaccgcggtgctgcgcgccgggttaacagaagtgttagtcaccggaatactaattaagtgaatcagggttaaggccagaccaatagcgatcggcgcaaaacctgccggcgcgaatttgtcggttgcgccgtggatcaccaacaggaaacctgcactcaataccagttcaactaccagcgcggaaagcatggaataaccgcctggtgaatgctcgccataaccgttagaagcaaaaccgctggctgccgcgtcaaaacccgttttaccactggcaattaaatacagcagcgccgctgcaacaataccgccgacaacctgggcaattacgtagccaacgacttcttttgccggaaaacgtccgccagcccataaaccaatagtgaccgccgggttaaaatgaccaccagaaatatgaccaacagcaaaggccatcgtcagaacggtcagaccgaacgccagcgccacgccggcaaaaccaatgcctaattccgggaagcctgcggccagtacagcactaccacagccaccaaaaacaagccagaaagtaccaaaacattcagctgctaattttctgaacatatccacctcaattaaaaattgaccctgtgaaaaatatggtcgttttatagggtcgtcgtaaaaaagtgacgacggaaataatgcgcggctattttaaaaacgaaggcgagtcattcaccagataaataaatccagtaaatttgatttagggcaacagcgggttgccccatatagtcatttgtctgattgacagtgtagtgcaagcaaaagatttaatcctttaggcgtaataaaaaataatttatcatgctaattatttgattttgttgtttttgcagacttatcagcaagagggagtataacgcgattattcgctcatttttcagacatttgccatgcttaaatgtgatgtcatcacgtattagcaaggcctttcccgttatactgccagcgtaaaggataagtcacatatttctggaggggatatgattcttgagcgcgttgaaattgtgggttttcgcggtatcaaccgtttgtcgttgatgctcgaacaaaacaacgtcctgattggggagaacgcgtggggtaaatccagcttgctggacgccttaaccctgctgctatcgccagaatcagatctctaccattttgagcgcgacgatttctggttcccgccgggagatatcaacgggcgagaacatcatctgcatattattttgaccttccgcgaatcgctgccaggccgacatcgggttcgccgttatcggccgctggaagcgtgctggacgccatgcaccgatggctatcaccgtatttttatcgtctggaaggggagagtgcggaagacggcagcgtgatgacactgcgcagttttctcgataaagacggacatccgattgatgtcgaggatattaacgatcaggcacgccatctggtgcgtttaatgccggtgctgcgcttgcgtgatgcccgttttatgcgccgtattcgtaacggcacggtgccaaatgttcccaatgtggaagtcaccgcgcgccagctcgatttcctcgcccgtgagttgtcctcacatccgcaaaatctctctgatggacagattcgtcagggactttccgcaatggtgcagttgcttgagcattatttctctgagcagggggccggacaggcgcgatatcgtttaatgcggcggcgggccagcaatgagcaacgaagctggcgctatctggacatcatcaaccggatgattgaccgacctggagggcgctcgtatcgggttattttgctcggcctgtttgctactttattgcaggcaaaaggcacattgagactggataaagacgcgcgtccgttattgctaattgaagatccagaaacccgtttacaccccattatgctttcagttgcctggcatctgttgaatcttctgccattgcagcgcattgccaccaccaactcgggtgagttgctttcgttaacgccggtagagcatgtttgccgactggtacgtgagtcctcgcgcgttgccgcctggcgtctggggccgagtggcttgagtaccgaagatagccgacgcatatcctttcacattcgttttaaccgtccgtcatcgctgtttgctcgctgctggttgctggtggaaggggaaacggaaacctgggttatcaatgaactggcgcgccagtgtggacaccatttcgatgccgaagggatcaaggtcattgagtttgcccagtccgggctaaagccactggttaaatttgcccgccgaatggggattgaatggcatgtactggtcgatggcgatgaagcagggaagaaatatgccgctacggtacgcagcctgttgaataacgatcgggaagccgaacgagaacatttaacggcgttaccggcgctggatatggaacattttatgtatcgccagggattttccgatgtgttccaccgcgtggcgcaaatcccggaaaatgtaccgatgaatctgcgcaaaattatctcgaaagcgatccatcgctcttccaaacccgatcttgccattgaagtggcaatggaggccggacgtcgtggtgtggactccgtaccgacgctgctgaaaaaaatgttctcacgcgtgctgtggctggcgcgcggtcgcgcggattaaccgcgaaacatcgtggccatttgtggctgaatagcgtcgagcatctcatagcgccgacggtattcagcccgtttttactggcgatttcggcaatctcttttcgtgctatctgtgctggaaggcggtaatggcgttcagcatcacatacgccgccaaccgattcccagaaagcgttgtaatcggcatggatcttgccttctttatcacgataacgcaggctgcggtaaatatgcgtttcattgctgacggcaataatctgctctacctgcaaacgttgggcaaacagacaggccgcttccatcacgaggcgtttgggaaatagcccgtggcaggctttcgtcgcattctggatttcctgatgtggaatttcccattttgcgccttgcagtccgccaataaacatcgttcttttcccctgatattcacacagggtaaacgtgatctctgccagaggaataccttcgctgttgcgaaacaggattgtgctgtcaccttctttatccattgagatcatcatggtcagctcaagcgtgaactgctcgccgtttttgccttccagtttagccagttgcagcccgggggtattcaaatataagctgaattcttccgccgacatacatccgcggagtaacgcataatggtaacgtaacgcctccagcaattgcttacggctaagattcgccgcaaggtaagggcgatgcagacgcacaggcagtcgcggttggcgcgttaacaacacattgagattaggccagtgggaaagttcgttcatccactcaacgcttaaacgcggcataatcaacgagcgcagcaaaaatttctggcgaaaactacggcgatgccagaatttacccggccgacactgtccacgtgccagactaagaaaaagtgacaggctgctgagagattcagatggcgtaaaggtccgttcagttagctgcgacatattcatgaaatcaatggttatacatgacgtcgatttcaccattgcgtatcttaaccaaacatcaatagtgtgattactaacgtaaattttagggttttgttgatatttcgttgaagttaatgacccggattggcatatggagtattcagaatatttatgaaaaagcggaaaaccgtgaagaagcgttacgttattgcgctggtgatagtcatcgccggactgattacgttatggagaattcttaacgcacccgtgccgacttatcagacactgattgtgcgccccggtgatttacagcaaagcgtgctggcgaccggaaagctggacgcgctgcgtaaggttgacgtgggcgcgcaggtcagcggtcagttgaaaactctgtcggtggcgattggcgataaagtaaaaaaagaccagcttttaggggttattgatcctgaacaggctgaaaaccagattaaggaggtcgaagcaacgctgatggagctacgtgcgcagcggcagcaggcggaagcggagctgaaactggcgcgggtgacgtattcccgtcagcaacgtctggcacaaacgcaggcggtttcacagcaggatctcgacaccgccgcgacggagatggctgtgaaacaggcgcaaattggcaccattgacgcgcaaatcaagcgcaatcaggcctctctcgatacggctaaaaccaatctcgattacactcgcatcgttgccccgatggccggggaagtcacgcaaatcaccactctgcaaggccagacggtgattgccgcacaacaagcaccgaacattctgacgctggcagatatgagcaccatgctggtaaaagcgcaggtttctgaagcggatgtaatccacctgaagccggggcaaaaagcctggtttacggtacttggcgatccactgacgcgctacgaggggcaaatcaaggatgtactaccgacgccggaaaaggttaacgacgctattttctattacgcccgttttgaagtccccaaccccaatggtttgctgcggctggatatgactgcgcaagtgcatattcagctcaccgatgtgaaaaatgtgctgacgatccctctgtcggcgttaggcgatccggttggcgataatcgttataaagtcaaattgttgcgtaatggtgaaacacgcgagcgtgaagtgacgattggcgcacgtaacgataccgatgttgagattgtcaaagggcttgaagcgggcgatgaagtggtgattggtgaggccaaaccaggagctgcacaatgacgcctttgctcgaattaaaggatattcgtcgcagctatcctgccggtgatgagcaggttgaggtgctgaagggcatcaccctcgatatttatgccggtgagatggtagcgattgttggcgcttcaggttccggtaaatcgaccctgatgaatattctcggctgtctggataaggccaccagcggcacctatcgcgtcgccggtcaggatgttgccacactggacgccgatgcgctggcgcaactgcgccgcgagcatttcggctttattttccagcgttaccatttactttcgcatttaaccgccgagcagaacgttgaagtacccgccgtctatgccggtcttgagcggaaacagcggctgcttcgcgcccaggggttactgcaacgactggggctggaagaccgtacagagtattatccggcacagctttcgggtggtcagcaacagcgcgtcagcatcgcgcgggcattgatgaacggcggtcaggtaattcttgccgatgaaccaaccggcgcactggacagccattctggcgaagaggtgatggcgatcctgcatcagctgcgcgatcgcgggcatacggtgattatcgtcacccacgatccgcaggtcgctgctcaggccgagcgggtgatcgaaattcgcgacggcgaaattgtgcgcaatcctcccgccattgaaaaagtgaatgttgctggcgggacggagcctgttgtcaacacggtgtctggctggcggcagtttgtcagcggttttaacgaggcgctgacgatggcatggcgggcgctggcagcgaataaaatgcgtactttactgaccatgctggggattattatcggtattgcgtcggtggtttccattgtcgtggtgggtgacgccgccaaacaaatggtgctggcggatattcgttctattggtacgaatactattgatgtctatcccgggaaagattttggcgatgacgatccgcaatatcagcaggcgctgaagtacgacgacttaatcgccatccaaaaacaaccgtgggtcgcctcagccacacctgccgtctcgcaaaacctgcgcctgcgttataacaatgttgatgttgctgccagtgccaatggcgtgagcggcgattattttaatgtctatggcatgaccttcagtgaaggaaacacctttaatcaggagcagctgaacggtcgtgcgcaggtcgtggttctcgacagtaatactcgccgccagcttttcccccataaagcagatgtggttggcgaggtgattctggtcggcaatatgcccgccagagtcattggtgtggcggaagaaaaacagtcgatgtttggtagcagtaaagtgctgcgtgtctggctaccttacagcacgatgtccgggcgagttatgggccagtcgtggctgaactccattactgtcagggtaaaagaaggatttgacagcgccgaggcggaacagcaactcacgcgtttactttcactgcgccacggaaagaaggatttctttacctggaacatggacggcgtcttgaaaactgttgaaaagaccacacgtactttacaactgtttctgacgctggtggcggtgatttcgctggtggtgggcggtattggtgtaatgaatattatgctggtgtcagtgaccgagcggacgcgggaaattggcattcgcatggctgtaggtgcgcgagcaagcgatgttttgcaacagttcctgatcgaagccgtactggtttgcctggtgggtggcgcgttgggaataactctgtcactgttaattgctttcaccttgcagcttttcttacccggctgggagattggtttttcaccgttggcactgctgctggcgtttctctgctcgacggccaccgggattttatttggatggttacccgcacgaaatgcggcacgactggatccagtagatgctctggcacgagagtaatttttgagataaaaatgccagccgatcgggctggcattttgcctttaggatgtacacaatgagacagaagagctatgcgactgccgcttctacttcgacgggcacaataacactggcgtgattgccttttggcccctggtggacatcaaactgaacggattgtccagcttttagcgttctgtaaccatccatctgaatggtggaataatgagcgaaaatatcttcgccgccgccttcagggcagatgaaaccaaaccctttggcattgttgaaccacttaacagtacccttttccatgcttcgacatccttcgcaaatcttatacaagtaagatggaataaaccggggtcagagagggggctgttcaaaacctcgccaactctagaaatacaatttagagaattagggcgagccgtcaagcgtttgacaggggccagggggcaggtatgaatcaaaaatttgaagcagttaacgctattgacaggaatgtgacagatgtcgctgatgccaacgatagatgatagttatctatcatgtggagtagattggtcaggcaaataagctcttgtcagcggcagggcgttctgccgataaccgtaaccgaagatgataactgacaatgggtaaaacgaacgactggctggactttgatcaactggcggaagaaaaagttcgcgacgcgctaaaaccgccatctatgtataaagtgatattagtcaatgatgattacactccgatggagtttgttattgacgtgttacaaaaattcttttcttatgatgtagaacgtgcaacgcaattgatgctcgctgttcactaccaggggaaggccatttgcggagtctttaccgccgaggttgcagaaaccaaagtggcgatggtgaacaagtacgcgagggagaatgagcatccattgctgtgtacgctagaaaaagcctgaatgcaggcataaaaattgggggaggtgcctatgctcaatcaagaactggaactcagtttaaatatggctttcgccagagcgcgcgagcaccgtcatgagtttatgaccgtcgagcacttgttactggcgctgctcagtaacccatctgcccgggaggcgctggaagcgtgttctgtggatttggttgcgctccgtcaggaactggaagcctttattgaacaaaccacacccgttctgcctgccagtgaagaggagcgcgacacacagccgacgctgagttttcagcgtgtactgcaacgtgcggtcttccatgtccaatcctccggtcgcaatgaggtaaccggtgcaaacgttctggtcgctatctttagcgaacaggagtcgcaggcggcatatctgttgcgtaaacatgaagtcagccgtctcgatgtggtgaactttatctctcatggcacgcgtaaagacgagccgacacagtcttctgatcctggcagccagccaaacagcgaagaacaagctggtggggaggaacgtatggagaatttcacgacgaacctgaatcagcttgcgcgcgtgggcggaatcgacccactgattggtcgtgagaaggagctggagcgtgctattcaggttctctgccgtcgccgtaaaaacaacccgctgctggtgggggaatctggtgtcggtaaaaccgcgattgcggaaggtcttgcctggcgaattgttcagggcgatgtgccggaagtgatggctgactgtacgatttactctctcgatatcggttctctgttagcgggcactaaatatcgcggcgactttgaaaaacgttttaaagcgttgctcaagcagctggagcaggacactaacagcatcctgtttattgatgagatccacaccattatcggtgcgggggcagcgtctggtggccaggtcgatgcggctaacctgatcaaaccgttgctctccagcggtaaaattcgcgtaattggttcgacaacctatcaggagttcagcaacattttcgagaaagaccgtgctctggcgcgtcgcttccagaaaattgatattactgaaccgtcgatcgaagaaactgttcaaatcatcaatggcctgaaaccgaagtatgaagcgcaccacgacgtgcgttataccgcaaaagcggtgcgtgcagcggtagagctggcggtgaaatacattaacgatcgtcatctgccggataaagccattgacgttatcgacgaagcgggcgctcgcgcacgcctgatgccggtaagcaaacgcaagaaaaccgttaatgtggcggatattgagtccgtggtggcccgtattgcgcgcattccagagaagagtgtttctcagagtgaccgcgataccctgaaaaacctcggcgatcgcctgaaaatgctggtcttcggtcaggataaagccattgaggcgctgactgaagccattaagatggcgcgtgcaggtttaggtcacgaacataaaccggttggttcgttcctgtttgccggccctaccggggtcgggaaaacagaggtgacggtacagctttcgaaagcgttgggcattgagctgctgcgctttgatatgtccgagtatatggaacgccataccgtcagccgtctgattggtgcgcctccgggatacgttggttttgatcagggaggtttgctgactgatgcggtcatcaagcatccacatgcggtgctgttgctggacgaaatcgagaaagcgcatccggacgtgttcaatattctgttgcaggtgatggacaacggtacgctgaccgataacaacggacgcaaagcggacttccgtaacgtggtgctggtgatgaccaccaacgccggggtacgtgaaactgagcgtaaatccattggtcttatccaccaggataacagcaccgatgcgatggaggagatcaagaagatctttacaccggaattccgtaaccgtctcgacaacattatctggtttgatcatctgtcaaccgacgtgatccatcaggtggtggataaattcatcgtcgagttgcaggttcagctggatcagaaaggtgtttctctggaagtgagccaggaagcgcgtaactggctggccgagaaaggttacgaccgggcaatgggcgcacgtccgatggcgcgtgtcatccaggacaacctgaaaaaaccgctcgccaacgaactgctgtttggttcgctggtggacggcggtcaggtcaccgtcgcgctggataaagagaaaaatgagctgacttacggattccagagtgcacaaaagcacaaggcggaagcagcgcattaatctgattgttaggtaggttggtcaagtccgtaatctcgaaagaggttacggactttttgtttatggggtggaggaggttcagaccctttttttaatgatgatggtaagttgttgataattagtgctgcgggaaggtaaggataaaaaagggtgctgcaggagaatgggatggttttgctttattaacaacgggctaaacgtgtagtatttgagttcactgccgtacaggcagcttagaaatcgacggggtgcggtaaaacctttgcgaacgcgttcactgccgtacagacagataaaatgcgaaaaaaaagctcgcactttcgtacgagctcttctttaaatatggcggtgaggggggattcgaacccccgatacgttgccgtatacacactttccaggcgtgctccttcagccactcggacacctcaccaaattgttttgtcgcctgacctcatgggtggcaacggggcgctactatagggagttggagtaaaacggtcaagaagaattttaatgataattattgtttgctcatactgtaaacaagttgtgcagtatatctacatcgagacaagttacggacttatacttccaaagtacttcatacatatcacaaaataaaaaggccggttaaaccgacctttttactcgttctttctcttcgcccatcaggcggtaaaacaatcagcgactacggaagacaatgcggcctttgctcaggtcgtacggggtcagttcaacagtcactttgtcgcccgtcaggatgcggatgtagtttttgcgcattttaccggagatgtgtgcagtaaccacgtgaccgttttctaactctacgcggaacatggtattaggcaacgtttcaagaacggtaccttgcatttcaatattgtcttctttggccatctaatcctctggggtatcactaccgtaatttgaaccggcaagataatgccgaagttctgtaaataagtaaagatttgcgcgctaaatcgcaacaaacaggttcggcacattactccgaaaacacacggctaagccgcaccaaaagcgcaacgtataagggagcggtgagataaacgatgggcgttacctgacgcgaaaaattccttatcggcagcggggtaatgagcgtaaccaactctgcgaccgcaattataacactctggggagaaatgtgccgaaaacattcattcttgtggtgaaaacaagcatcgtggtacccagaaattattcggcaatcgtccgaggcgcatttgattgagataattaaggtaatcccggcggggaatttcgcaggcaccaagcgatgctgtgtgatcgttaaggacctggcagtcgataagcttaccgccatgaccgataaattcctcacagaataccagaagcgccgttttagacgcattttccatccggctgaacatggactcgccacaaaatagcgttccctgggccacgccgtacataccgccgacaagctcatcttcacgccagacttcaatggagtgggcatggccgagttcgtgaaggcgatggtaggcttcgaccacgccacgcgtgatccaggttccttcttcgcgatcgctggcacagccttcaatgacctgaccaaaagcgtaattcatcgtgacacgatagggcgagcgtttatgaaatcgcttcatactacggctgatatgcagtgattctggccatagcaccgcgcggggatcgggcgaccaccagaggatggggtcgcctggagaaaaccacggaaaaataccacgctggtaagccattaacaggcgcgcagggctaagatcgcccccaagtgccagcaggccgttaggctcacgtaatgcgccttccggggaagggaaggctattgaatggcgagaaagctgaaccaggcgcatgaccgcaaaactccacgcaagtcggatcgttcaataatagcttacaaaccctgcttgaactggtaataacgcccctgtctggcaagcagctctgcgtgagtaccttgctcaataatttgcccgttgtccatcactattatttgttggaaacgagagagtccgcgaagtcgatgggtgaccattaacaccgttttctcacgcatcatttctgcaagcaattcaaggatctggctttcggttgtggcatctaagccttcggtaggttcatccagcaacaccagtggcgcatcatgtaacagcgcacgggcgatagccagacggcgcagttcaccaccggagagctggcgtccgccttcacctaaccaactgttgagacctgcatcctcgagcagcttctccaggccaacgcgacgcaagctctccgccagagcctcatcactactgccaggcgaggcgagtaacagattatcacgcagcgtggcgctaaacagatgcactcgctgaggaacaacgctgatggtctgtcgtagagccgcttcattcaggctggctatggggctatcgttaagcaaaatctcgccctgttgcgggtcccaagcgcgggtcagcagttgtaacagtgttgatttgccgcatccggttcgcccgagaatcgcaatatgttccccggcgtttacctgaagagaaatccctttaagtgcctgttgggattgctccggataagtgaactgaacatcccgtaatgtcagcgaaacgcgatcggcaacacgagtttgggtatcagggaaggtgacttccggtttttgatccgttaaatcagtgatccgaacggcagaggcaatgacttgccccagatgctgaaatgcacccgttactggtgccagtgcttcaaacgcggctaacgcgcagaagacaaacagggcaattaacgcgccgggttgagcattgccgccaacgccgccagacgccatccacagcatcaggatcaccgctaacgcgccaatgagtagcattatcgcttgcgacaatgcggtcagttcagattgacggcgttgcgcttccagccattgaatttctgtattctctagttgcgtgcgataacgatcgctggcaccaaaaatggtcagctcagcttgcccttgcagccaggccgtcagttgttggcgatactgtccgcgaagatgagtcagattttgcccggtgctttttcccgcacgataaaacagcggtggcatcaggaaaagcgtcagtaacataatgccgcccagcgtaaaggcgagggtgaaatcaaggaaacttaacccgattgtcaccaccataatcaccacaaaagcgcccaccagcggcgagataacgcgcagataaagatgatcgagcgtatcaacatccgccaccacgcgattgagcaattcgccctgacgatagcgcgccagtccggcaggggagaggggcagcaatttgctgaaggtgtaaatgcgcagatgctgcaacacgcggaaagtcgcgtcgtgacttaccagacgttcaaaataacgcccggcagtacgggtgattgctgcgccacgcacgcccgcagcgggtagcatatagttgaagctgtacagtccggcaacccccgcaaccgctgaggccgagaggaaccagccggaaagtgtcaacagaccgatactggcgagcagcgtgacaattgccagcacgataccaagacttaacatccatttatgacgtttatacagtgccagatagggtagcaaagcgcgcatttaaatctcctcctgacgatgggccagtaatgtggcgaatgggccaccagccacacttaattccgcgtaacgtccttgctcaataatccggccatcctgcataacccaaatgacatcccagtcagcaagatcttctaactggtgggtgaccattaacgttgtctggcgcagagaggcggcattcagcgcctccattacgcgctgttcactgtgagcatcaaggctggcagcgggttcatccaacagtaatagcgaacagggatttagtaacgcacgggccaccgccacgcgctgcgcctgccccacggaaaggcgggcagcctggtcgccaacaggcgtatcaacgccttgtggcaggagcggtagaaactcgctgacccaggcgttatccagcgctgcttgtaattcttgttcgctggcatcaggtcgcgccagtagtacgttatcccgcaatgttgctgccggtaattgtgggttttgcccaacccaggagagatgtttacgccatgattctggtgataaatcgcgtaattctatcccgttgattcgtaatgatccctgatatgagagaaaaccagaaagcgcgttcagcagtgagcttttacctgaaccgctgcgaccaaccaacactgcacgttgacctgctggcaaagtaaagttcagcggtccggccagcgttttaccttccggcgacgtgataaacagatcctcggcctcaatggtcaccggatcggtcgatgctatttccgtctcaccgcgctgcggatgggcgagcggggtttccataaacgttttcagactgtcagctgcaccaacagcctgggctttagcatgataaaacgtaccgagatcgcgtaatggctggaaaaactctggcgcaaggatcagggccagaaaacccgcagccagcgtcacgccagtatcgtagtgaccaaaatccagctcgccgagataggaaaaaccaaagtagaccgccaccagagcaattgacagcgaggtaaaaaattcgagaatgccggaggataaaaacgccagccgtagcacttccattgtccgttggcggaaatcttccgaagcagaacgaatactttcaatttcagcttcaccacgaccaaaaatacgcaatgtttccatgccgcgcaggcgatcgaggaaatgcccacttaagcgagcaagagcgagaaagttacgccggttagcatcggcagcccccatcccaaccagcgccataaacaacggaattaacggtgctgtgcccagcagaatgagcgccgcagcccagttagaggggaagatcgccaccacaatcagcaacggcaccgacactgccagcgccatttgcggcaggtagcgtgcatagtaatcatgcatatcgtcaatttgctcgagtaccaacgtcgcccagctccccgcaggtttaccctgaatccacgctggccctgcttgttgcagacggtcgagaacctgacggcggatggcaaagcggatatgctgcccggcgtgataacccacccgttcgcgtaaccagaccacccatgcgcgcagtacaaaggtcagaaccagtaacgtaaagggaagcagcagggcttcacggggaatattctccataatcatatgttgcagaattcgcgccatgaaccaggcctgggcaatgatcaatatgccgcttacaaagcccagcagacgagaaatattcagccaacgttgggagatgacgctttgctgttttaaccagcgggttaactctttttgacgggatttattcattgcacgcttagcaggtgagttatcagaattatttgcagagcaatgttacaacggggaaaaaataaaggcgacccatagtcgcatggtgtcgccttctttacttttgttactgatttgtaaaattattttgcgtcagctaaaccatcgaggtagcgttccgcatcaagtgctgccatgcagcctgtaccggccgaagtaatggcctgacgataaatatgatccatcacgtcacccgcggcaaagacgccaggaatgctggtctgggtggcattaccatgaatacccgactgcactttgatgtagccgttttccagttccagctgcccttcgaaaatggcagtattcgggctgtgaccgatagcaacaaacagaccggcaacgtcgagtgactcgatgttatcgctgttttgcgtatcgcgcagacgaacgccagtgacacccatttgatcgccggtcacttcttccagcgtacggttggtgtgcagaatgatgttgccgttctccactttatccatcagacgcttaataaggattttttccgcgcggaaaccgtcacggcggtgaatcagatgcacttccgaagcgatgttagacagatacagcgcctcttcaaccgcggtattgccgccgccgatgaccgcaactttctggttgcgatagaagaaaccgtcgcaggttgcacaagcagaaaccccacggcctttaaaggcttcttcagagggcaggccgagatagcgtgcagaagctccggtggcaataatcagcgcgtcgcaagtgtattcgccgttatcgccattcagacggaacggacggttttgcagatccaccttgttgatatgatcaaaaatgatctcagtttcaaacttggtggcatgttcgtgcatgcgctccattaataacggaccggttagatcgtttggatcgccaggccagttttccacttccgtggtggtggtcagttggccgcctttttccatgccggtaatcagcacaggttgcaggttggcgcgcgccgcgtagacagcagcggtgtatcccgccgggcctgaacccaggataagcagtttactgtgtttggtcgtgcccatgagatccccatagttgttggcagacaatgggcaggattgtagggaatttacagacgtaaaaaaagagtatgacgattttgttaacaatttgtgcaatcggcagcatcgataagcaggtcaaattctcccgtcattatcacctctgctacttaaatttcccgctttataagccgattaaatgatgaataaacgcccctgttaatgaatatctggcatgttgtactaaaaatcgatgttttgctttgacaatcccctggtgttttgcgaaaacattcgaggaagaaaaaaaacagtattcttatatgcgcataaccatgcatgtaaataccatgtttaccgtgctagtgaaatctacgtatggcgtggacagacgccattcgtgatgtcgatagctgccacaaggcaacggtcttctcaccgtagacccaggcattgcgcgccgtgaatcttcatgatttcggtctatcgtgacgggtagcgactctgaacagtgatgtttcagggtcagacaggagtagggaaggaatacagagagacaataataatggtagatagcaagaagcgccctggcaaagatctcgaccgtatcgatcgtaacattcttaatgagttgcaaaaggatgggcgtatttctaacgtcgagctttctaaacgtgtgggactttccccaacgccgtgccttgagcgtgtgcgtcggctggaaagacaagggtttattcagggctatacggcgctgcttaacccccattatctggatgcatcacttctggtattcgttgagattactctgaatcgtggcgcaccggatgtgtttgaacaattcaataccgctgtacaaaaacttgaagaaattcaggagtgtcatttagtatctggtgatttcgactacctgttgaaaacacgcgtgccggatatgtcagcttaccgtaagttgctgggggaaaccctgctgcgtctgcctggcgtcaatgacacacggacatacgttgttatggaagaagtcaagcagagtaatcgtctggttattaagacgcgctaacacggaacaggtgcaaaatcggcgtattttgattacactcctgttaatccatacagcaacagtactggggtaacctggtactgttgtccgttttagcatcgggcaggaaaagcctgtaacctggagagcctttcttgagccaggaatacactgaagacaaagaagtcacattgacaaagttaagtagcggccgtcgccttctggaagcgttgctgatccttattgtcctgtttgccgtctggttgatggctgccttactaagctttaacccttcggaccccagctggtcgcaaacggcctggcatgaacctatccataatttaggtgggatgcccggtgcgtggctggcagatacgctgttctttatttttggcgtgatggcttacaccattcccgtcattattgtcggcggttgttggtttgcctggcgtcatcagtccagtgacgaatacattgattattttgccgtttcgctacgcatcattggcgttttggcgctcatccttacctcctgtggtctggcggcaatcaacgctgacgatatctggtattttgcctccggtggcgtcattggcagcttactaagcactacgctacaaccactgctacacagtagcgggggaactattgcgctgctctgcgtttgggctgcgggcctgacgctgttcaccggttggtcatgggtgaccattgctgaaaaactcggcggctggattttaaacattctcaccttcgctagtaatcgtacccgtcgcgatgatacctgggtcgatgaagatgaatatgaagatgacgaagagtatgaagatgaaaaccacggcaaacagcatgaatcacgccgtgcccgtattcttcgcggcgcgctagcgcgtcgtaaacggttggcggaaaaattcattaatccgatggggcggcaaacagacgctgcgttgttctccggtaagcggatggatgatgacgaagagattacctacactgcacgcggtgtggctgccgacccggacgacgtcctattttcgggcaatcgtgcaacgcagccagaatatgacgaatacgatccattattaaacggtgcgccaattaccgaacctgtcgctgtggcagctgctgctaccacggcgacacaaagctgggctgcgccggttgaacctgtgactcagacgccgcctgttgcctctgttgatgttccaccttcgcaacctacagtagcctggcagcctgtaccgggtccacaaacgggagagccggttattgctcctgcaccggaaggttacccacagcagtcacaatatgcgcagcctgcagtgcaatataatgagccgctgcaacaaccagtacagccgcagcagccgtattatgcacctgcagctgaacaacctgcgcaacaaccttactacgctcctgcggcggaacaacctgttcagcaaccgtattacgcccctgcgccagaacaaccggtggcaggtaacgcctggcaagccgaagagcagcaatccacttttgctccacagtctacataccagactgagcaaacttatcagcaaccagccgctcaggagccgttgtaccaacagccgcaatccgttgaacagcagcctgttgtggagcctgaacccgttgtagaagagacaaaacccgcgcgtccgccgctttactattttgaagaagtggaagagaagcgagcccgtgaacgtgaacaacttgcggcctggtatcaaccgattccagaaccggttaaagaaccagaaccgatcaaatcttcgttgaaagcgccttctgttgcagcagtacctccagtagaagccgctgccgctgtttctccgctggcatctggcgtgaaaaaagcgacactggcgacgggggctgccgcaaccgttgccgcgccagtcttcagtctggcaaatagcggtggaccgcgtccgcaagtcaaagaggggattggcccgcagttgccacgaccgaaacgtatccgcgtgccaactcgtcgtgaactggcgtcttacggtattaagctgccctcacagcgtgcggcggaagagaaagcccgtgaagcccagcgcaatcagtatgattctggcgatcagtataacgatgatgaaatcgatgcgatgcagcaggatgaactggcacgtcagttcgcccagacacagcagcaacgctatggcgaacagtatcaacatgatgtgcccgtaaacgcagaagatgcagatgctgcggcagaggctgaactggctcgtcagtttgcgcaaactcaacaacaacgttattccggcgaacaaccggctggggcgaatccgttctcgctggatgattttgaattttcgccaatgaaagcgttgctggatgatggtccacacgaaccgttgtttacgccaattgttgaacctgtacagcagccgcaacagccggttgcgccacagcagcaatatcagcagccgcaacagccggttgcgccgcagccgcagtatcagcagccacaacagcaggttgcgccgcagccacaatatcagcagccgcaacaaccggttgcgccacagccgcagtactcagcagccgcaacaaccggttgcgccgcagccgcagtatcagcagccgcaacaaccggttgcgccgccgcagcagtatcagcagccacaacagccagttgcgccacaaccgcaggataccctgcttcatccgctgttgatgcgtaatggcgacagccgtccgttgcataaaccgacgacgccgctgccttctctggatttgctgacaccgccgccgagcgaagtggagccggtagatacctttgcgcttgaacaaatggctcgcctggtggaagcgcgtctggctgatttccgtattaaagccgatgtcgtcaattactctccggggccggttatcactcgctttgaacttaacctggctcctggcgtaaaagcggcgcgcatttctaacttgtcacgggaccttgcccgttcactttcgacggtggcggtgcgtgtcgttgaagttattcctggcaaaccctatgtaggtctggagttaccaaataaaaaacgacaaaccgtttatctgcgcgaagttttggataacgccaaattccgcgataatccgtcgccattaaccgtggtgctgggtaaagatatcgccggtgagccggtggttgccgatctggcgaaaatgccgcacttgttggttgcggggactaccggttccggtaaatctgtcggtgtgaacgcgatgatcctgagcatgctttataaagcacagccagaagatgtgcgtttcatcatgatcgacccgaaaatgctggagctttcggtttatgaaggcattccgcatctgttaacggaagtcgttactgatatgaaagatgccgccaacgcgctgcgctggtgtgttaacgagatggagcgtcggtataaactgatgtctgcgctgggtgtgcgtaatctggcgggttataacgaaaaaattgctgaagccgatcgcatgatgcgtccgattccagacccgtactggaagccgggtgacagtatggatgcccagcatccggtgctgaaaaaagaaccatacattgtggtgttggttgacgaatttgccgacctgatgatgacggtaggtaaaaaagtggaagagctgatagcacgtctggcgcaaaaagcccgtgccgcgggtatccacctcgtactggcaactcagcgtccatcggttgatgttattactggtctgattaaagcgaatattccgacccgtatcgcctttaccgtatccagtaagattgactcacgtaccattcttgatcaggctggcgcggaatcactgctggggatgggggatatgctctactctgggccgaactccacgttgccggtacgtgtccatggtgcttttgttcgcgatcaggaagttcatgccgtggtgcaggactggaaagcgcgtggtcgcccacagtatgttgatggcatcacttccgacagtgaaagcgaaggtggcgcgggcggtttcgatggcgctgaagaactggatccgttgttcgatcaggcggtgcagtttgtcactgaaaaacgcaaagcgtcaatttctggcgtacagcgtcagttccgcattggttataaccgtgcagcgcgtattatcgaacagatggaagcgcaggggattgtcagcgaacaggggcacaacggtaatcgtgaagtgctggccccaccgccgtttgactaattaatgcattgccggataaggcgcggtagcgtcgcatccggcactctatcaactgaaaattcagtattttcttctttcctcaagctgattattagcctggaatagagagtagagggaactcccgatcgggagtgacgtaatttgaggaataatgatgaaaaaaattgccatcacctgtgcattactctcaagcttagtagcaagcagcgtttgggctgatgccgcaagcgatctgaaaagccgcctggataaagtcagcagcttccacgccagcttcacacaaaaagtgactgacggtagcggcgcggcggtgcaggaaggtcagggcgatctgtgggtgaaacgtccaaacttattcaactggcatatgacacaacctgatgaaagcattctggtttctgacggtaaaacactgtggttctataacccgttcgttgagcaagctacggcaacctggctgaaagatgccaccggtaatacgccgtttatgctgattgcccgcaaccagtccagcgactggcagcagtacaatatcaaacagaatggcgatgactttgtcctgacgccgaaagccagcaatggcaatctgaagcagttcaccattaacgtgggacgtgatggcacaatccatcagtttagcgcggtggagcaggacgatcagcgcagcagttatcaactgaaatcccagcaaaatggggctgtggatgcagcgaaatttaccttcaccccgccgcaaggcgtcacggtagatgatcaacgtaagtagaggcacctgagtgagcaatctgtcgctcgatttttcggataatacttttcaacctctggccgcgcgtatgcggccagaaaatttagcacagtatatcggccagcaacatttgctggctgcggggaagccgttgccgcgcgctatcgaagccgggcatttacattctatgatcctctgggggccaccgggtaccggcaaaacaaccctcgctgaagtgattgcccgctatgcgaacgctgatgtggaacgtatttctgccgtcacctctggcgtgaaagagattcgcgaggcgatcgagcgcgcccggcaaaaccgcaatgcaggtcgccgcactattctttttgttgacgaagtgcaccgattcaacaaaagccagcaggatgcatttctgccacatattgaagacggcaccatcacttttattggcgcaaccactgaaaacccgtcgtttgagcttaattcggcactgctttcccgtgcccgtgtctatctgttgaaatccctgggtacagaggatattgagcaagtactaactcaggcgatggaagacaagacccgtggttatggtggtcaggatattgttctgccagatgaaacacgacgcgccattgctgaactggtgaatggcgacgcgcgccgggcgttaaatacgctggaaatgatggcggatatggccgaagtcaatgatagcggtaagcgggtcctgaagcctgaattattgaccgaaatcgccggtgagcgaagcgcccgctttgataacaaaggcgatcgcttttacgatctcatttccgcactgcataagtcggtacgtggtagcgcacccgatgcggcgctctactggtatgcgcgaattattaccgctggtggcgatccgttatatgtcgcgcgtcgttgcctggcaattgcttccgaagatgtcggcaatgccgacccacgggcgatgcaggtggcaattgcggcctgggattgctttactcgcgttggcccggcggaaggtgaacgcgccattgctcaggcgattgtttacctggcctgcgcgccaaaaagcaacgctgtctacactgcgtttaaagctgcgctggcggatgctcgcgaacgtccggattatgacgtgccggttcatttgcgtaatgcgccgacgaaattaatgaaggaaatgggctacgggcaggaatatcgttacgctcatgatgaagcaaacgcttatgctgccggtgaggtttacttcccgccggaaatagcacaaacacgctattatttcccgacaaacaggggccttgaaggcaagattggcgaaaagctcgcctggctggctgaacaggatcaaaatagccccataaaacgctaccgttaatgttatcgttgcggtaatgttgttactgtatccctgtggtcgcaggctgtggccacatctcccatttaattcgataagcacaggataagcatgctcgatcccaatctgctgcgtaatgagccagacgcagtcgctgaaaaactggcacgccggggctttaagctggatgtagataagctgggcgctcttgaagagcgtcgtaaagtattgcaggtcaaaacggaaaacctgcaagcggagcgtaactcccgatcgaaatccattggccaggcgaaagcgcgcggggaagatatcgagcctttacgtctggaagtgaacaaactgggcgaagagctggatgcagcaaaagccgagctggatgctttacaggctgaaattcgcgatatcgcgctgaccatccctaacctgcctgcagatgaagtgccggtaggtaaagacgaaaatgacaacgtcgaagtcagccgctggggcaccccgcgtgagtttgactttgaagttcgtgaccatgtgacgctgggtgaaatgcactctggcctcgactttgcagctgcagttaagctgactggttcccgctttgtggtaatgaaagggcagattgctcgcatgcaccgcgcactgtcgcagtttatgctggatctgcataccgaacagcatggctacagtgagaactatgttccgtacctggttaaccaggacacgctgtacggtacgggtcagctgccgaaatttgctggcgatctgtttcatactcgtccgctggaagaagaagcagacaccagtaactatgcgctgatcccaacggcagaagttccgctgactaacctggtgcgcggtgaaatcatcgatgaagatgatctgccaattaagatgaccgcccacaccccatgcttccgttctgaagccggttcatatggtcgtgacacccgtggtctgatccgtatgcaccagttcgacaaagttgaaatggtgcagatcgtgcgcccggaagactcaatggcggcgctggaagagatgactggtcatgcagaaaaagtcctgcaactgctgggcctaccgtaccgtaaaatcatcctttgtaccggcgacatgggctttggcgcttgcaaaacttacgacctggaagtatggatcccggcacagaacacctaccgcgagatctcttcctgctccaacgtttgggatttccaggcgcgtcgtatgcaggctcgttgccgcagcaagtcggacaagaaaacccgtctggttcataccctgaacggttctggtctggctgttggtcgtacgctggttgcagtaatggaaaactatcagcaggctgatggtcgtattgaagtaccagaagttctgcgtccgtatatgaacggactggaatatattggctaatacccaatttttctgaatctaaaaagcgcctgcgggcgctttttttgtctccctttgataccgaacaataattactcctcacttacacgtaatactactttcgagtgaaaatctacctatctctttgattttcaaattattcgatgtatacaagcctatatagcgagctgctatagaaataattacacaatacggtttgttactggaatcaatcgtgagcaagcttgagtgagccattatgaaaacgaaaatccctgatgcggtattggctgctgaggtgagtcgccgtggtttggtaaaaacgacagcgatcggcggcctggcaatggccagcagcgcattaacattaccttttagtcggattgcgcacgctgtcgatagcgccattccaacaaaatcagacgaaaaggttatctggagcgcctgtacagttaactgtggtagtcgctgcccgctacgtatgcacgtcgtggacggtgaaatcaaatatgtcgaaacggacaataccggcgatgacaattacgacggcctgcaccaggttcgcgcctgtctgcgtggacgttccatgcgtcgccgtgtctataatccggaccgcctgaaatatccgatgaaacgagtcggggcgcgcggtgaaggcaaatttgagcgcattagttgggaagaagcctacgacatcatcgcgaccaatatgcagcgcctgatcaaagagtacggcaacgaatccatctatctgaactatggcaccggtacgctgggcggcaccatgacccgctcctggcccccgggaaataccctggtcgcgcgcctgatgaactgctgcggcggttatctgaaccattacggtgactactcttccgcgcaaattgcggaaggtttgaactatacctacggcggctgggcagatggtaacagcccgtcggatatcgaaaacagtaaactggtagtgctgtttggtaataaccctggcgaaacgcgaatgagtggcggtggggtgacttactatcttgaacaggcacgccagaaatctaatgcccgcatgatcatcatcgatccgcgctataccgacaccggtgccgggcgcgaagatgagtggatccctattcgtccgggaacagatgccgcactggttaacggtctggcgtacgtcatgatcactgaaaacctggtggatcaggcattcctcgataaatattgcgttggctacgatgagaaaaccctgccagccagtgcgccgaaaaatggccactataaagcttatattctgggtgaagggccagatggcgtggctaaaacaccggaatgggcctcacaaatcaccggtgttccggcagacaaaatcatcaaactggctcgtgaaatcggcagtaccaaaccggcgtttatcagccagggatgggggccacagcgccacgccaacggcgaaatcgcgactcgcgctatctcgatgctggcgattctgaccggtaacgtcggcattaacggcggtaacaccggcgcgcgtgaaggttcctatagcctgccgtttgtccgtatgccgaccctcgaaaacccgatccagaccagcatttctatgtttatgtggaccgatgccattgaacgtggcccggaaatgacggcgctacgtgatggtgtgcgcgggaaagataagctggatgtgccgatcaaaatgatctggaactatgccggtaattgcctgattaaccagcattctgaaatcaaccgtacccatgaaatccttcaggatgataagaagtgcgagctgattgtggttatcgactgccacatgacctcatcggcgaaatatgctgacatcctgctgcctgactgcaccgcttccgaacagatggactttgcactggatgcatcctgcgggaatatgtcttacgtgattttcaacgatcaggtgattaaaccgcgctttgaatgtaaaaccatctatgaaatgaccagcgaactggcaaaacgtcttggcgttgagcaacagtttactgaaggccgtacacaggaagagtggatgcggcatctgtatgcccagtcgcgggaagcgattcctgaactgccaacgtttgaagagttccgcaagcaggggatctttaaaaagcgcgacccacaagggcatcacgttgcttataaagccttccgtgaagatccgcaggcaaacccactgactacgccatcgggcaaaattgagatttattcgcaggcgctggctgacattgccgctacctgggaattgccagaaggcgatgtgatcgatccactgccgatctacacgccgggctttgaaagttatcaggatccgctgaacaaacagtatccgctgcagcttacgggtttccactataaatctcgcgttcactcaacttacggcaacgttgatgtgctgaaagcggcttgccgtcaggaaatgtggatcaacccgcttgatgcgcaaaaacgcggtatcaacaacggcgataaagtcaggatctttaacgatcgtggtgaagttcatattgaggcgaaagtgacgccacgaatgatgccgggtgtggtcgcactgggtgaaggtgcctggtatgacccggatgcaaaacgtgtcgataagggcggttgtattaacgtactgaccactcaacgtccgtctcctctcgctaaggggaatccgtcacatacaaaccttgttcaggttgaaaaggtgtaaggagtaaccgatgacaacccagtatggattttttattgattccagccgttgcaccggttgcaaaacctgcgagctggcctgtaaagactacaaagatttgacgccagaagtcagcttccgccgcatttatgaatatgctggcggcgactggcaggaagataacggtgtctggcaccagaacgtgtttgcctactatctgtcgatttcatgtaaccactgcgaagatccggcttgtactaaagtctgcccgagcggtgcgatgcataaacgtgaagatggttttgttgtggtcgatgaagatgtgtgcattggctgccgctactgccatatggcttgcccgtatggcgcaccgcaatataacgaaacgaaaggccatatgaccaaatgcgatggttgttatgaccgtgttgcggagggtaaaaagccgatctgtgttgaatcttgtccgctgcgggcgctggatttcggccctatcgacgagctgcgtaaaaaacatggcgatctggcggccgttgcgccgttgccgcgagctcactttaccaaaccgaatattgtgatcaaacccaatgccaatagccgcccgaccggggataccactggctatctggcaaacccgaaggaggtgtgagatgggaagtggatggcatgaatggccgctgatgatcttcacggtcttcgggcaatgtgtagcaggtggttttatcgttctggctttggcgctgctcaaaggcgacctgcgagcagaagcccagcagcgtgttatcgcctgcatgtttggtttatgggtgctgatgggcattggctttatcgcctctatgctccatcttggttcaccaatgcgcgcttttaactcgctcaaccgggtaggggcttcagcactcagtaacgaaatcgccagcggttcgatcttttttgccgtaggcggcatcggctggttgctggcaatgctgaaaaagctgtcaccggcattgcgtacgctgtggctgatagtgacgatggttcttggcgtcatctttgtctggatgatggtgcgtgtgtataacagcattgataccgttccgacctggtacagcatctggacgccgatgggcttcttcctgacgatgtttatgggcggcccgttactgggttacctgttgttgagtctggctggcgtcgatggctgggcgatgcgtctgctgccagcaatttctgtactggcactggtagtgagtggcgtggtgtcagtgatgcagggcgcagagctggcgactattcatagttctgtgcagcaggccgcagcgctggtgccggactatggtgcgctgatgtcctggcggatcgtgcttttggccgttgccctgtgcttgtggattgcaccacagctaaaaggttatcagcctgcggttccgctactatccgtctcattcattctgcttctggcaggggaattaatcggtcgcggcgtattctatggtttgcatatgaccgtggggatggccgtcgcaagctaatcagtaacaaccggggtttcggccccggttctcttttatttctgcttcgttaacgtgtcataactggtcatcaaattacgataatcaggaatgtggttagagaacaacgtcgccagtccttcaatatcattacgccagtcgcgatgcagctcgcacgccacgccgaaccatgtcatcaattgcgcaccagcttgcgacatgcgatcccatgccgaatgccgggtaatttcattaaaggtccctgacgcgtcagtcacgacaaagacgtcaaacccttcttcaatggctgaaagcgccgggaatgccacgcaaacttcggttaccacaccggcaataattaactgttttttacctgtcgctttgacagcttttacaaaatcttcgttatcccaggcgttaatatttcccgggcgagcaatgtaaggtgtatcggggaattgtgctttcagttctggaactaatgggccgttaggaccggtttcaaaactggtggtaagaatagttggtaagttgaaatacttagccaggtcacccagcgccagcacgttatttttaaacttatcaggttcgatatcccgtacaagggaaagtaaaccagcctggtgatcaacaagcaaaacggcagcatcatttttatcaagacgaacatacggtttggtcatcctcttctcctttcgagagtcagtggtacgtctgaaatcgatcagacgcgatgcattgctctgaaagcatagacgggaaatatgagtttgctgtgaccatgaaatttttcgactgaacgaagcgtatgaaatttgtgttagttcaataaaaacaatcagatgagactaatcatctcttcagcattagcgttatgaatgagtaatataaatcgataataccgccgctgggatatcgcgtattttcacccattgacaatgtttttggcggtggcatgatgcgcatgaaatttgaacttcctcacggttttaattcatgtccacgtatacccggcctgtcatgcttttgctgtctggcctgcttttgttgactctggcgattgcggtgttaaatacactcgtgccgctttggctcgcccaggaacacatgtccacatggcaggtaggcgttgtcagctcatcctattttaccggcaaccttgtcggtacattgctgacagggtatgtcattaagcgcattggctttaaccgcagctattatctggcctccttcatttttgccgctggctgtgccggccttggcctgatgattggattctggagctggttggcttggcgttttgtcgcgggcgtcggctgtgccatgatttgggtggttgttgagagcgcgctgatgtgcagtgggacgtcacgtaaccgtgggcgtttgcttgctgcgtatatgatggtttattacgtgggaacgtttttaggccagttactggtcagcaaagtttcaaccgagctgatgtccgtattgccgtgggttacaggtttgacgttggcagggatcttaccgctgttgtttacgcgtgtgctgaatcagcaggctgaaaaccatgattcgacgtcaattacgtcaatgctaaaactccgtcaggcgcggcttggcgtgaatggctgcattatctcaggaatcgttctgggatctctatatggcctgatgccgctgtacctcaatcacaaaggggtgagcaatgccagcattggtttctggatggcggtactggtcagtgcgggtatccttggacaatggccgattggacgtctggcggataagtttggtcgactgctggtgttgcgtgttcaggtctttgtcgtcattctcggcagtatcgcgatgcttagccaggcggcgatggccccagcgttattcatcctcggtgccgctggctttacgctatatccggtggcgatggcatgggcttgcgagaaagttgaacatcatcaactggtggcgatgaaccaggccttactgttgagctatactgtgggaagtctgcttggcccgtcatttaccgctatgctaatgcagaatttctccgataatttattgtttatcatgatcgccagcgtatcgtttatctatttgctgatgctgctgcgcaacgccggtcatacgccgaaacccgttgctcacgtgtaaatgaattcaagcagagtgtgaacttactgtttcacactctgcttttttgtttcttctatctgacttgctttattccaaattttattcgtttaaaaataaaatgtgcagcaggttataattttgcatttcgctatttccgcacttcttatttgccgcgcataatccctcgttttacagatgcccctttaattttggcgaaggatttgtctatggctgggaatgttcaggaaaaacagctgcgatggtacaacattgcgctgatgtcttttatcactgtctggggttttggcaacgttgttaataactacgccaaccaggggctggtggttgttttttcatgggtgtttatctttgcgctctatttcacaccttatgcgctaattgttggtcagttaggctcgaccttcaaagatgggaggggcggggtcagtacctggattaaacacacgatgggacccggactggcttacctcgccgcgtggacctactgggtagtgcatattccctatctggcacaaaaaccccaggcaatactgattgcgctcggttgggcgatgaaaggcgacggttcgttaatcaaagaatattcagtcgtagcgttacaggggttaacgctggtgctgtttatcttctttatgtgggttgcttcacgcggtatgaaatcgctgaaaatcgtcggttctgtggcagggattgcgatgtttgttatgtcgctcctgtatgtggcgatggcggtaaccgcgcctgcaattactgaagtgcatattgcgaccacaaacattacctgggaaacgttcattcctcatatcgactttacctacattaccactatttcaatgctggttttcgcggttggcggagcagagaagatttctccttacgttaatcaaacgcgcaacccaggaaaagaatttccaaaagggatgttatgcctggcggtgatggttgcggtttgtgccattctgggctcgctggcgatggggatgatgtttgattcgcgtaatatcccggatgacttaatgaccaacggtcagtattacgcctttcagaagctgggcgagtattacaacatgggtaatactttaatggtgatttacgccattgcgaataccctgggacaagtagcggcgctggtattctcgattgatgccccgcttaaagtgctattaggtgatgctgacagcaaatatattccagccagtttatgtcgtaccaacgcttctggtacgcccgttaatggctattttctgaccctggtactggtggcgattctgattatgctgccgactctcggcattggtgatatgaacaatctctataaatggctgttgaaccttaattcggtagtgatgccgctgcgttatttatgggtatttgttgcatttattgcagtcgttcgcctggcgcagaaatataaaccagaatatgtctttattcgtaataagcctctggcaatgaccgtcgggatttggtgttttgcctttaccgcctttgcctgtttgacggggatcttcccgaaaatggaagccttcactgcagagtggaccttccagttggcgctgaatgttgcaacgccgtttgtgctggtaggattaggactgattttcccgctgctggcgcgtaaagcgaatagtaaataattattgtggtcggtgacgctgactctggcagatctgacccgtttttacataatcgagaaatgcgcgcaagccgcaggacatatactggcggtttggataatagatctggaagcctggacgctctgtgctccagtcttccagtacacattctaaacgaccagtatcaaggtactccttgatctgttcatagagcagatacccgataccagcacccatcaaaacggcctccagttcagcatcaacatcatccagaatgatatttcctgcgacagcaatttccagctcctttgcaaattgccagtggaaaggtttgccgctgggataacgaaaaacaacacattgatgattaagcagatcatgaggatggcggggtttgccatatcttgcaaagtactctggcgttactgctacacataatttcactggcgggccgatcgccacgctgatcatatctttttcgacgatgccactaagtcgaacgccagcgtcaaagccctgttggacgatatcgacaagagagtcgtcagttgtgagctcgactttaatatcaggatattcacgtgtgaaaccaaccagtaaaggcattaaaaatatacgtgcagctacccgggcggcattgattttgagcgttcctgtcggtgtcagacgaaaatcattcatctcatctaacatgatctgaatttcgtcgaaagctgggcgcaatcgttcatagagattagaacccgcttccgttaacgatacgcttcgggttgtccgattgaataagcgaattttaagacgttgttccagtgttttaatactatggctaatggcggacgaggataagcctaactcatcgcccgctgcacgaaagctttgattacgggccacggcaaagaaagtggcaaagtcagacatattcatccgcattagtgaaaatccttcattaactcatcctgaatcatcacgtttacaggattatgccgcctgcgtaaagtgcgctccagaacttaacgtggaggtaaaattatgcagtctgaacgtatttatttggtatgggcccatcctcgtcatgattcattgaccgcacatattgctgatgcgatccatcagcgggcaatggagcggaaaatacaggtgacggaactcgatttatatcggcgtaatttcaacccagtgatgacgccggaagatgaaccagactggaagaatatggataaacgttattctccagaggttcatcagctttattcagagctgcttgaacatgacacgttagtggtggtttttcctctctggtggtacagcttcccggcaatgctaaaaggatatattgacagagtatggaataatgggctggcttatggagatgggcacaaattaccattcaataaagttcgttgggtggcgctggttggaggagacaaagaatcatttgtccagatgggctgggaaaaaaatataagcgattatttaaaaaatatgtgcagttatcttggtattgaagatgccgatgtcactttcttgtgtaatacagtggtattcgatggggaagaacttcacgcgagctattatcagtcgttattatctcaggaacgggatatggtagatgcactataagatgtgttaaaaacgctgtagcagaatgaagcgcggaataaaaaagcggcaactcaataaagttgccgctttacggggaaattagaacattaccttatgaccgtactgctcaagaatgcctttcacgcgttccatggtctctttcttcggtggtttaacaccgtcgagtttgtactcttcacccattgccacccatttgtgtttgcccagctcgtggtaggggagaagctcgattttctcaacgttgcccatatcacgggtaaattcaccgaggcgatgcgctgaatcgtcatcgtcagaccagcctgggacaacaacgtagcggatccacaccttcacatttttgttcgccagatatttagcgaactccagcgtgcggtggttggaaactccaaccagattttggtggatctcgtcgttcatctgtttgagatcgagcattaccaggtcggttacttccagcagttcatcaatcaccggatcgtaacgacgaacaaaaccgttggtgtccagacaggtatgaatgccttcttttttgcaggcgcggaaccagtcacgaacaaactcagcttgcaggattgcttcaccgccggatgcggtaacgccgccgccggaagcgttcataaagtggcgataggtcaccacttccttcatcaaatcttcaacggtaacttctttaccgccatgcgtgtcccaggtgtcgcggttatgacaatacaggcagcgcatcaggcagccctggaaaaaggtgataaagcgaatacctgggccgtctacggttccacaggattcaaaggagtgaatgcgaccaataactgacattgcggtgtttctccagatgtggcccatctgaggccgtgttggtgcgcagctcgaaggctacgtcgagtctgttttggcagtcaccttaaagtatagatagctgacaaaaaaggctctcgtgctaaaaaaggccccactttcgtggagcctttattgtacgctttttactgtacgatttcagtcaaatctaattacatagattgagtgaaggtacgagtaataacgtcctgctgctgttctttagtcagcgagttgaaacgtactgcgtagccagatacacggatggtcagctgcggatatttttccgggttttccatcgcgtcgagcagcatttcacggttcatcacgttaacgttcaggtgctgaccaccttcgatggatgcttcgtggtggaagtaaccatccatcagacctgccaggttggtcttacgaacttcgtcgtctttacccagtgcgttcggaacgatagagaaggtgtaggagataccatctttagcgtaagcaaacggcagtttagcaacggaagtcagagacgctacagcacctttctggtcacgaccgtgcatcgggttagcacccggtccgaacggcgcgccagcacgacgaccgtctggggtgttaccagttttcttaccatacacaacgttagaagtgatggtcagaacagactgagtcgggatagcgtcacggtaggtgtgcagtttctgaattttcttcatgaaacgttctaccaggtcaacagccaggtcatctacacgcggatcattgttaccaaactgcgggtattcgccttcgatttcgaagtcgatagccagaccgtcttcgtcacgaatcggtttaactttcgcatatttgattgcagacagggagtcagcagcaacggacagaccagcgataccacacgccatggtgcggataacgtcacggtcgtgcagcgccatcagagaggcttcgtagctgtacttgtcgtgcatgtagtggatgatgttcagtgcagtgatgtactgtttagccagccagtccatgaagtgatccatgcgctccatcacttcatcgtagttcaggagatcgcctttgatcggttcagacttcggaccaacctgcattttcagtttttcgtcaacgccgccgttgattgcgtacagcatggttttcgccaggtttgcacgcgcaccgaagaactgcatttgtttaccaacgatcatcgggcttacgcagcaagcgatagcatagtcatcgttgttgaagtccggacgcatcaggtcatcgttctcatactgcagagaagaggtgtcgatggacactttagcggcgaatttcttgaagttcagcggcagtttttcagaccacagaatggtcatgttcggttccggagacggacccatggtgtacagggtgttcaggaaacggaagctgtttttggtaaccagggtacgaccgtcgaggcccataccaccgatagattcggttgcccagatcgggtcgccagagaacagttcatcgtactccggagtacgcaggaagcgaaccatacgcagtttcatgaccaggtggtcaaccatttcctgcgcttcttgttcggtgatcttgccagctttcaggtcacgttcgatgtacacatccaggaaggtggaggtacgaccgaaggacattgcagcaccgttctgagacttaacagcagccaggtagccgaagtaagtccactggatagcttcctgagcgttggtagccggaccagagatgtcgtagccgtatttcgcagccatttctttcatctgacccagagcgcggtgctgttcagcgatttcttcgcgcagacggatagtctgttccaggtttacgccgttttccagatcagcctgcagagaggtgaactgagcgtatttgtctttcatcaggtagtcgataccgtacagcgcaacgcgacggtagtcaccgatgatacggccacggccataagcatctggcagaccggtcagaacaccggatttacggcaacgcaggatgtccggagtgtaaacgtcgaacacgccctggttgtgagttttacggtattcagtgaagatttttttgatcatcgggtccagttcgcggttgtacgctttgcaggaaccctcgatcattttgataccaccgaacgggataagagcacgtttcagcggagcttcagtctgtagaccaacaactttttccaacgctttgttgatgtagccagcgtcgtgagaggtgatggtggaagcaacagcggtgtcaaagtcaactggcgcgtgagtgcggttttccagtttaacgccttccattactttgtcccacagggtggtggtcgcttcagtagcgccagccaggaaggactcgtcaccctcgtacggagtgtagtttttctgaatgaagtcacggacgtttacttcattctgccagtcacctttggtaaaaccttcccaggctgtggctaacttttcattaagctcggacatgtaacacctaccttcttaagtggattttttatttactgcgtacttcgacaaccattaatggtgatcgttttcacgcaggtaaatgacccagtatgtcaacccaaccaacaaaccaccgccgataatattaccgatcgtaaccggaatcaggttatcagtgatgaagttcatcacggtcaggtgagaaaaattttccggtgcagaaccgaccgcggtccagaattccggagatgcgaagtcgcggattacaatacccatcgggatcataaacatgtttgcgatactgtgctcaaaaccgctggcaacaaacatcgcgaccggcagcaccataatgaacgctttgtccatcaggctgcggccagaataactcatccatactgccagacataccatcaggtttgccaggataccaagacagacggcctcaataaaagtatggtgcactttgtggtcggcggtttgtaggacgtttagtccccattgaccatttgcggtcatatactcgccggaaagccacattaaaagtacaaacagcagtgcgccgaccaggttgccaaaatagacatttagccagtttttcgccaactgaccccaggtgatgcgcccactcgccttagcaacaacaatcaacacggtggaagtaaagagatcggctccgcagacaacacaaagaatcagccccagagagaagcaaatgccgccaaccagttttgccatgccgaagggcattgtgcctgtgccagtggttgctgtgatatagaagacgaatgcgattgagatgaaaacaccggcggtaatcgccagatagaaagtcttaagcggatgtttcgttgctttatagacacccgcctcttcggccactttggccattgcagcaggaagtaaaagatcaaaagggttgtcagctttcacactaactctctctttattaagtcggcgacgagatactaacaaagcattatagatgagaaattgatatagatcatatctcgcctggcttataggcccgtaactcgcatggtttttatgcaaatacggagtaaatatttgattatccaaataaaaataaattttaaaaattaacaaatgagttgaattttttccgcatcctccgctaaaacagttaattaaaagggagcatcaggcgaataaagtaacaatatcgatcgtatttattaaatacaaattaccgatatttaaccttataattacaattattttattaatgcaaatatatgtaaagcggggcattaaaaaacgccccgtaatataactcagactaatcattaagcctacattgcgtaggctatttgattttattttgcccagaatgctgctttggcgcgctgcagcttttcgtaggccttcaacaacgactgatgtgcagcaaacgcgtgcagatcgctatctaccggttgcaggccgtaaaacgccgcttcgccgctcattgccgcactggcggcttctacggcatctgcgccgtacatgcgaacaaacgcattcagatattgcagcggctggcgatcttcttcctgtgccagtaataacaacgtttgcaggcagcgataatagttggcgcgttccggactaaatactgatgagttaaactccatcgtccattcggtccagaccagagcctgttccagatcgccaccagccagcgccagcatggcttttaattcaccgatacgcagggtgtaccaaccgttatccgacccggtcgccagacccaacagctcacgcacgcgggtaaagtcatcaaaaccttcttcatccagttgctcgatgaggttcaggtaatcttctttttcccactcgctgcctggtagcgaaagaatcgtttcacgtaaatggctgcccatactgttattcgcgagccacagatcttcagccggataaatatcggacatgccaggcacgataatacggcaagcataaacgcccagatgctcgtaatcggcaatataaacttctttatcttctttgttgaagatagccatcagtgtggcgaactcttcttccgtggtgccggagaaattccagtccacaaacggataatcggcatcctgcttgaacaggtcccaggagattaaaccgctggaatcgataaagtgcgtttcgaggttggtatgttcagcgacttcttcatcatcgaaggttggcggagtaaacacatccaaatctttcaggccacgaccttgcagcagctcggtcacggtacgttccagtgctacgccaaaatcaggatgcgcaccgaaagaggcaaagcaggtaccgttagcaggattgaacagtaccacgcaaatcaccggatactggccgccaagcgaaccgtcataagcgaagattgggaaaccctccgcttccagcgtttcgatggcttcaactactgctgggtaacgcgccagcacgtctgccgggatctctggcaggctgatgctttcagcaataatgcggtttttcacgtagcgttcgaaaacttcagacaatccctgaacgcgtgcttcgttgcgggtattacctgcggacataccgttggagacgtacaggttaccaatgatattcatcggaatataaacggtctgattgtcggactgacgcgtaaacggcaggccgcaaataccacgatcttcgttaccggattgtaggtcaatcagcatgctgccggtcagttcattctccggatcataaaacgcgcgcagacggtcatcgagtagtccttctggcacatcgtcattttcggtcagtgggaaccatttttcgttgggataatgcacgaacggaccgttggcgatggtttcgcccagccagaaatcagcaaaaaagtagttggttgagagacgctcgaaatattcaccaagtgcagaagccagcgccgcttttttggttgcgcctttaccgttggtaaaacacagtgcgcactctttgtcgcgaatatgtacagaccagacgttaggcacaggattcagccaggaggcctcttcaatctgaaagccgaggtctgaaagtttttgctggaagcgagcgatggaatcttccagagcggcatctttgccggggataaatgtttgcgtcatgaaaatcactttagtcgtacggaaagcgcgcaataatacgggttttatctcaaaggcgctatcaccgccgccatgccgatgaactgttgactatgcttttagcggataaaccacgataagagcataaaaatgaaggcgttcgatctccaccgtatggcatttgataaagtgccttttgatttccttggcgaagttgcactacgtagtctttatacctttgtactggtttttctgttcctcaaaatgaccggaagacgcggtgtgcgacagatgtcgctgtttgaagtgttaatcattctcacgctgggttcagcggcgggagatgtggcgttttatgatgatgtgccgatggtgccggtacttatcgtctttatcactctggcgttgttataccgcctggtaatgtggttgatggcgcacagtgaaaaactggaagatttactggaaggtaagccggttgttattattgaagatggcgagctggcctggtcgaaactcaataactccaacatgacggaatttgagttctttatggagctacgattgcgtggcgtagagcagctggggcaggtacgtctggcgattctcgaaaccaacgggcaaatcagtgtctatttctttgaagatgacaaggtgaaaccgggtttacttattttacccagtgattgtacgcagcgttacaaagtggtgccggagtcggcggactatgcctgtattcgttgtagtgaaatcattcatatgaaagcgggggaaaaacaattatgtccgcgctgtgcaaatccagaatggacgaaggcaagtcgggcaaaacgggtgacctgacagtaaaaacatcggctttttgctaataatccgagagattcttttgtgtgatgcaagccacatttttgccctcaacggttttactcattgcgatgtgtgtcactgaatgataaaaccgatagccacaggaataatgtattacctgtggtcgcaatcgattgaccgcgggttaatagcaacgcaacgtggtgaggggaaatggctcaaatcttcaattttagttctggtccggcaatgctaccggcagaggtgcttaaacaggctcaacaggaactgcgtgactggaacggtcttggtacgtcggtgatggaagtgagtcaccgtggcaaagagttcattcaggttgcagaggaagccgagaaggattttcgcgatcttcttaatgtcccctccaactacaaggtattattctgccatggcggtggtcgcggtcagtttgctgcggtaccgctgaatattctcggtgataaaaccaccgcagattatgttgatgccggttactgggcggcaagtgccattaaagaagcgaaaaaatactgcacgcctaatgtctttgacgccaaagtgactgttgatggtctgcgcgcggttaagccaatgcgtgaatggcaactctctgataatgctgcttatatgcattactgcccgaatgaaaccatcgacggtatcgccatcgacgaaacgccagacttcggcaaagatgtggtggtcgccgccgacttctcttcaaccattctttcccgtccgattgacgtcagccgttatggcgtgatttacgctggcgcgcagaaaaatatcggcccggctggcctgacaatcgtcatcgttcgtgaagatttgctgggcaaagcgaatatcgcgtgtccgtcgattctggattattccatcctcaacgataacggctccatgtttaacacgccgccgacatttgcctggtatctatctggtctggtctttaaatggctgaaagcgaacggcggtgtagctgaaatggataaaatcaatcagcaaaaagcagaactgctatatggggtgattgataacagcgatttctaccgcaatgacgtggcgaaagctaaccgttcgcggatgaacgtgccgttccagttggcggacagtgcgcttgacaaattgttccttgaagagtcttttgctgctggccttcatgcactgaaaggtcaccgtgtggtcggcggaatgcgcgcttctatttataacgccatgccgctggaaggcgttaaagcgctgacagacttcatggttgagttcgaacgccgtcacggttaatgccgaaattttgcttaatccccacagccagcctgtggggtttttatttctgttgtagagagttgagttcatggaatccctgacgttacaacccatcgctcgtgtcgatggcactattaatctgcccggttccaagagcgtttctaaccgcgctttattgctggcggcattagcacacggcaaaacagtattaaccaatctgctggatagcgatgacgtgcgccatatgctgaatgcattaacagcgttaggggtaagctatacgctttcagccgatcgtacgcgttgcgaaattatcggtaacggcggtccattacacgcagaaggtgccctggagttgttcctcggtaacgccggaacggcaatgcgtccgctggcggcagctctttgtctgggtagcaatgatattgtgctgaccggtgagccgcgtatgaaagaacgcccgattggtcatctggtggatgcgctgcgcctgggcggggcgaagatcacttacctggaacaagaaaattatccgccgttgcgtttacagggcggctttactggcggcaacgttgacgttgatggctccgtttccagccaattcctcaccgcactgttaatgactgcgcctcttgcgccggaagatacggtgattcgtattaaaggcgatctggtttctaaaccttatatcgacatcacactcaatctgatgaagacgtttggtgttgaaattgaaaatcagcactatcaacaatttgtcgtaaaaggcgggcagtcttatcagtctccgggtacttatttggtcgaaggcgatgcatcttcggcttcttactttctggcagcagcagcaatcaaaggcggcactgtaaaagtgaccggtattggacgtaacagtatgcagggtgatattcgctttgctgatgtgctggaaaaaatgggcgcgaccatttgctggggcgatgattatatttcctgcacgcgtggtgaactgaacgctattgatatggatatgaaccatattcccgatgcggcgatgaccattgccacggcggcgttatttgcaaaaggcaccaccacgctgcgcaatatctataactggcgtgttaaagaaaccgatcgcctgtttgcgatggcaacagaactgcgtaaagtcggtgcggaagtagaagaggggcacgattacattcgtatcactccaccggaaaaactgaactttgccgagatcgcgacgtacaatgatcaccggatggcgatgtgtttctcgctggtggcgttgtcagatacaccagtgacgattcttgatcccaaatgtacggccaaaacatttccggattatttcgagcagttggcgcggattagccaggcagcctgaatgaacaacgggcaataaatagccaaatctttctttatcaaaacgtcggcacattgtcggcgtttttttcggaccttgtgagtcattttgattaatggtagcgtcgcttgtcaatgtaagttgttgatacataatatttatatatgattaatcaacggatgattcacatgaagaatactaaattactgctggcgattgcgacctctgcagcattactgacagggtgtcaaaatacccacggtattgataccaatatggctatcagctccggtttaaatgcctataaagcagcaacattaagcgatgccgatgcaaaagcgattgccaatcagggctgtgccgaaatggacagcggcaatcaagtcgcaagtaaatccagcaagtacggtaaacgtctggcaaaaatcgccaaagcattgggtaacaatattaatggcacgccggtcaactataaggtttatatgaccagcgacgtcaacgcatgggcgatggcgaacggctgtgtccgtgtctacagtggcctgatggacatgatgaatgacaacgaaattgaaggtgttctgggccatgaactgggccacgtcgcgttgggtcactcgctggctgaaatgaaagcttcttatgcgatcgttgccgcacgcgatgccatttcagctaccagcggtgtggcttcccagctttcccgctcacaattgggtgatatcgcagaaggcgctattaatgctaaatactcccgtgataaagagtccgaagcagatgatttctcctttgatctgttgaagaaacgtggcatcagcacccaggggctggttggcagctttgaaaaactggctagtctggatggcggtcgcacccagtccatgtttgactctcacccaccatcaacagagcgtgcgcaacacatccgtgatcgtatcgcctctggtaagtaaatcattgtcatctttcgggctggtcttctgccagcccgctataattgcgcaataaatccccatctgaatacagacaaaactggtttttgcacacaacgttaacgatttgtggcgtcggcgcgtataatgcgcgcggttatgttaacggtacgcctgttttaaggagataaagatgacggcaattgccccggttattaccattgatggcccaagcggtgcagggaaaggcaccttgtgtaaggctatggcggaagcattgcaatggcatctgctggattcgggtgcaatttatcgcgtactggcattggcggcattacatcaccatgttgatgttgcgtcagaagatgcgctggtaccgctggcatcccatctggatgtacgttttgtgtcaaccaatggcaatctggaagtgatcctcgaaggggaagatgtcagcggcgaaattcgtactcaggaagtggcgaatgcagcttcacaagtcgcggcattcccacgcgttcgtgaagcattattgcgtcgccaacgcgcgtttcgcgaattacccggcctgattgccgatggccgcgacatgggaacggtggtattccctgatgcgccagtgaaaattttccttgacgcctcctcggaagaacgtgcgcatcgccgcatgctacagttgcaggagaagggctttagtgttaactttgagcgccttttggccgagatcaaagaacgcgacgaccgcgatcgtaaccgagcggtagcgccactggttccggcagccgatgctttagtgttggattccaccaccttaagcattgagcaagtgattgaaaaagcgctacaatacgcgcgccagaaattggctctcgcataagcgaccgaatttgcagtacccccgttgcaatggaatgacagcgggtatgttaaacaaccccatccggcatggagccaggtggacgttaaatataaacctgaagattaaacatgactgaatcttttgctcaactctttgaagagtccttaaaagaaatcgaaacccgcccgggttctatcgttcgtggcgttgttgttgctatcgacaaagacgtagtactggttgacgctggtctgaaatctgagtccgccatcccggctgagcagttcaaaaacgcccagggcgagctggaaatccaggtaggtgatgaagttgacgttgctctggacgcagtagaagacggcttcggtgaaactctgctgtcccgtgagaaagctaaacgtcacgaagcctggatcacgctggaaaaagcttacgaagatgctgaaactgttaccggtgttatcaacggcaaagttaagggcggcttcactgttgagctgaacggtattcgtgcgttcctgccaggttctctggtagacgttcgtccggtgcgtgacactctgcacctggaaggcaaagagcttgaatttaaagtaatcaagctggatcagaagcgcaacaacgttgttgtttctcgtcgtgccgttatcgaatccgaaaacagcgcagagcgcgatcagctgctggaaaacctgcaggaaggcatggaagttaaaggtatcgttaagaacctcactgactacggtgcattcgttgatctgggcggcgttgacggcctgctgcacatcactgacatggcctggaaacgcgttaagcatccgagcgaaatcgtcaacgtgggcgacgaaatcactgttaaagtgctgaagttcgaccgcgaacgtacccgtgtatccctgggcctgaaacagttgggcgaagatccgtgggtagctatcgctaaacgttatccggaaggtaccaaactgactggtcgcgtgaccaacctgaccgactacggctgcttcgttgaaatcgaagaaggcgttgaaggcctggtacacgtttccgaaatggattggaccaacaaaaacatccacccgtccaaagttgttaacgttggcgatgtagtggaagttatggttctggatatcgacgaagaacgtcgtcgtatctccctgggtctgaaacagtgcaaagctaacccgtggcagcagttcgcggaaacccacaacaagggcgaccgtgttgaaggtaaaatcaagtctatcactgacttcggtatcttcatcggcctggacggcggcatcgacggcctggttcacctgtctgacatctcctggaacgttgcaggcgaagaagcagttcgtgaatacaaaaaaggcgacgaaatcgctgcagttgttctgcaggttgacgcagaacgtgaacgtatctccctgggcgttaaacagctcgcagaagatccgttcaacaactgggttgctctgaacaagaaaggcgctatcgtaaccggtaaagtaactgcagttgacgctaaaggcgcaaccgtagaactggctgacggcgttgaaggttacctgcgtgcttctgaagcatcccgtgaccgcgttgaagacgctaccctggttctgagcgttggcgacgaagttgaagctaaattcaccggcgttgatcgtaaaaaccgcgcaatcagcctgtctgttcgtgcgaaagacgaagctgacgagaaagatgcaatcgcaactgttaacaaacaggaagatgcaaacttctccaacaacgcaatggctgaagctttcaaagcagctaaaggcgagtaattctctgactcttcgggatttttattccgaagtttgttgagtttacttgacagattgcaggtttcgtcctgtaatcaagcactaagggcggctacggccgcccttaatcaatgcagtaacagcagccgcttaatttgcctttaaggaaccggaggaatcatgaccaagtcagaattgatagaaagacttgccacccagcaatcgcacattcccgccaagacggttgaagatgcagtaaaagagatgctggagcatatggcctcgactcttgcgcagggcgagcgtattgaaatccgcggtttcggcagtttctctttgcactaccgcgcaccacgtaccggacgtaatccgaagactggcgataaagtagaactggaaggaaaatacgttcctcactttaaacctggtaaagaactgcgcgatcgcgccaatatttacggttaagtttttactcaaacttgaacgcgagaaaagcacctgtcgggtgcttttttcatttctctaatcaggaactggaagctgcctcgcagagttttgagcagttttcaccctttcgttaaattcttctgaatgtgcctcggggaacgcaaaattcccaccagacaaccgctcaacaaagttgcacactttccataaacagggaggggtgcatgaaaataacgacagtcggtgtatgcataattagcggaatttttccgttgctgattttgccccaattgcctgggacattaacccttgcgtttctgactctcttcgcctgcgtactggcatttatccctgttaaaaccgtccgttatatcgcgctgacgttgctgtttttcgtttggggcatattatcagcaaagcaaattttgtgggcaggagaaaccttaactggcgcgacgcaggatgcaattgttgagatcactgcaactgacggcatgaccactcattacggtcaaattactcatctacaaggtcgacgtatattccctgcgtcaggtctcgtgatgtatggcgaatatcttccgcaagcggtttgtgctggacaacaatggtcaatgaaactcaaagttcgtgcagttcatggccaacttaatgatggcggctttgatagccagcgttatgccattgcccagcatcagccgctcaccggccgttttctgcaggcaagtgtcattgaaccgaattgtagcctgcgtgcacagtatctggcgtcactacaaacaacgctgcaaccctatccgtggaatgcggttattcttggtttaggtatgggggaacggttatccgtccccaaagaaatcaaaaatatcatgcgcgatactggaacggcgcatttaatggcgatatcgggattgcacatcgcttttgcggcgttgctggctgccggactcattcgcagtggacaaatttttctgcctgggcgctggatccactggcaaataccattaattggcggaatctgctgtgctgctttttatgcctggttgacgggaatgcaacctcctgcattgcgtaccatggtggcgcttgctacgtggggaatgcttaagttaagtgggcgacagtggagtggctgggatgtatggatatgttgtctggcggcaattttgctgatggatcctgttgccattctctcgcaaagtttatggctctctgccgctgcggtcgcggcattgatattttggtatcagtggtttccctgtcctgagtggcaactgccgccggtattgcgtgcagttgtttccctcatccatctgcaactgggaatcacacttctgcttatgcccgtgcaaatcgtcatatttcatggcattagtctgacctcgtttattgcaaatctattagcaattcccttggtgacatttatcacggttccgttgatcctcgccgcgatggttgtgcatttaagcgggccgttaatcctggagcaagggttatggtttcttgccgaccggtctttggctttacttttctgggggttaaagagtttgccagaagggtggatcaacattgctgaacgttggcaatggctatcattttccccatggttcttactggtggtatggcgattaaacgcctggcgaacgttgccagcaatgtgtgtggctgtaggcttgctgatgtgctggccgctgtggcaaaaacctcgacctgacgagtggcaggtgtacatgcttgatgtcgggcaagggctggcaatggtgatagccagaaacggcaaagcgattctctatgacacaggactggcctggcccgaaggggatagtgggcaacaactgattatccctggctccactggcataatcttgaaccggaaggcgttattctgagtcatgaacatctggatcaccggggagggctggactcaatattgcacacatggccgatgttatggatcagaagtccgttaaactgggaacatcatcagcctgtgtgcgtggcgaagcgtggcaatggcaaggattgcgtttcagcgtgcactggcctttacaagctagcaacgataaaggaaataaccattcctgtgtggttaaggttgatgacgggacgaatagcattcttctaaccggtgatattgaagtccccgctgaacaaaagatgctaagccgttactggcagcaagtgcagacaacattgcttcaggtacctcaccatggcagtaatacctcatcatcgttgccattaattcagcgagtgaatggaaaagtggcactcgcatcggcatcgcgctataacgcatggcgattgccctctaataaagttaagcatcgctatcaacagcaaggatatcaatggcttgatactccacatcagggtcaagtgacggtcaatttttcagcgcaaggctggcggattagcagcctcagagagcaaattttacctcgttggtatcatcagtggtttggcgtgccagtggataacgggtagaatatgcggctatttcaacaaatgctggttttttgaatgcataacgacaaagatctctctacgtggcagacattccgccgactgtggccaaccattgcgccttttaaagcgggtctgatcgtggcgggcgtagcgttaatcctcaacgcagccagcgataccttcatgttatcgctccttaagccacttcttgatgatggctttggtaaaacagatcgctccgtgctggtgtggatgccgctggtggtgatcgggctgatgattttacgtggtatcaccagctatgtctccagctactgtatctcctgggtatcaggaaaggtggtaatgaccatgcgtcgccgcctgtttggtcacatgatgggaatgccggtttcattttttgacaaacagtcaacggggacgctgttgtcacgtatcacctacgattccgaacaggttgcttcttcttcttccggcgcactgataacggttgtgcgtgaaggtgcgtcaatcatcggcctgttcatcatgatgttctattacagttggcaactgtcgatcattttgattgtgctggcaccgattgtttcgattgcgattcgcgtagtatcgaagcgttttcgcaacatcagtaaaaacatgcagaacaccatggggcaggtgaccaccagcgccgaacaaatgctgaagggccacaaagaagtattgattttcggtggtcaggaagtggaaacgaaacgctttgataaagtcagcaaccgaatgcgtcttcaggggatgaaaatggtttcagcctcttccatctctgatccgatcattcagctgatcgcctctttggcgctggcgtttgttctgtatgcggcgagcttcccaagtgtcatggatagcctgactgccggtacgattaccgttgttttctcttcaatgattgcactgatgcgtccgctgaaatcactgaccaacgttaacgcccagttccagcgcggtatggcggcttgtcagacgctgtttaccattctggacagtgagcaggagaaagacgaaggtaagcgcgtgatcgagcgtgcgactggcgacgtggaattccgcaatgtcacctttacttatccgggacgtgacgtacctgcattgcgtaacatcaacctgaaaattccggcagggaagacggttgctctggttggacgctctggttcaggtaaatcaaccatcgccagcctgatcactcgtttttacgatattgatgaaggcgaaatcctgatggatggtcacgatctgcgcgagtataccctggcgtcgttacgtaaccaggttgctctggtgtcgcagaatgtccatctgtttaacgatacggttgctaacaacattgcttacgcacggactgaacagtacagccgtgagcaaattgaagaagcggcgcgtatggcctacgccatggacttcatcaataagatggataacggtctcgatacagtgattggtgaaaacggcgtgctgctctctggcggtcagcgtcagcgtattgctatcgctcgagccttgctgcgtgatagcccgattctgattctggatgaagctacctcggctctggataccgaatccgaacgtgcgattcaggcggcactggatgagttgcagaaaaaccgtacctctctggtgattgcccaccgcttgtctaccattgaaaaggcagacgaaatcgtggtcgtcgaggatggtgtcattgtggaacgcggtacgcataacgatttgcttgagcaccgcggcgtttacgcgcaacttcacaaaatgcagtttggccaatgatcgaaaaaatctggtctggtgaatcccctttgtggcggctattgctgccactctcctggttgtatggcctggtaagtggcgcgatccgtctttgctataaactaaaactgaagcgcgcctggcgtgcccccgtaccggttgtcgtggttggtaatctcaccgcaggcggcaacggaaaaaccccggtcgttgtctggctggtggaacagttgcaacagcgcggtattcgcgtgggggtcgtatcgcggggatatggtggtaaggctgaatcttatccgctgttattgtcggcagataccacaacagcacaggcgggtgatgaacctgtgttgatttatcaacgcactgatgcgcctgttgcggtttctcccgttcgttctgatgcggtaaaagccattctggcgcaacaccctgatgtgcagatcatcgtaaccgacgacggtttacagcattaccgtctggcgcgtgatgtggaaattgtcgttattgatggtgtgcgtcgctttggcaatggctggtggttgccggcggggccaatgcgtgagcgagcggggcgcttaaagtcggttgatgcggtaatcgtcaacggtggtgtccctcgcagcggtgaaatccccatgcatctgctgccgggtcaggcggtgaatttacgtaccggtacgcgttgtgacgttgctcagcttgaacatgtagtggcgatggcggggattgggcatccgccgcgcttttttgccacgctgaagatgtgtggcgtacaaccggaaaaatgtgtaccgctggccgatcatcagtctttgaaccatgcggatgtcagtgcgttggtaagcgccgggcaaacgctggtaatgactgaaaaagatgcggtgaaatgccgggcctttgcagaagaaaattggtggtatttgcctgtagacgcacagctttcaggtgatgaaccagcgaaactgcttacgcaactaacctcgctggcttctggcaactagttacgccgcggcagcgttcgattgatggagtcatgaatgtcgctgccgcacctctcccttgctgatgcgcgtaatcttcaccttgccgcacaaggcctgttaaacaaaccccgccgtcaagcgtcgttggaggatattccggcaacgatctcccgcatgtccttgctgcaaatcgataccatcaatattgttgcccgtagtccatatctggtgcttttcagtcgtctgggaaattatcctgcccagtggctggatgagtctctggcgcgtggcgaattaatggaatactgggcgcatgaagcctgctttatgccgcgtagcgactttcgtcttattcgccaccgcatgctggcacctgaaaaaatgggctggaaatacaaagacgcctggatgcaggaacatgaggcggaaattgcacagttaattcagcatattcatgataaggggccggtacgttcagccgattttgagcatcctcgtaaaggtgcaagcggctggtgggaatggaagccgcataaacggcatctggaaggtttatttactgccggaaaggtgatggtgattgaacggcgcaacttccagcgcgtttatgatttaacccaccgtgtcatgcctgactgggatgatgagcgcgatctcgtttcgcaaacagaagcagaaatcatcatgctggataacagtgcgcgtagcctgggaatattccgcgaacagtggctggcagattactatcggctgaaacgtccggcactggcggcgtggcgcgaagcgagggctgaacagcaacaaatcattgctgtgcatgttgaaaaattgggcaatctttggctgcatgctgatttgctgccgctactcgagcgtgcgctggccggaaagctcactgcaacgcacagcgcggtactttcgccttttgatcctgttgtctgggatcgcaaacgcgcagagcagctttttgattttagctaccggctggagtgctataccccagcgccgaaacgccagtatggctattttgttctgccattattacatcgtgggcaattagttgggcgaatggatgccaaaatgcatcgccagacaggcatccttgaagttatctctctgtggttacaggaaggcattaaaccaacgacaatgctgcaaaaagggttacgtcaggcgattactgatttcgcgagctggcagcaggcaacgcgggtgacattaggacgctgcccgcaaggtctctttactgattgccgcactggctgggaaatagaccccgtcgcataaatgattatgataagatttatgcattcataacccgatccatctggaggaactatggatcatcgtctgcttgaaatcattgcctgcccggtttgcaacggaaaactttggtataaccaagaaaaacaagaacttatttgcaaactggacaacctggctttcccgctgcgtgatggcattccagtgttgctggaaacggaagcccgcgtgctgactgctgatgagagtaaatcatgagttttgtggtcattattcccgcgcgctacgcgtcaacgcgtctgcccggtaaaccattggttgatattaatggcaaacccatgattgttcatgttcttgaacgtgctcgcgaatcaggtgccgatcgcatcatcgtggcaaccgatcatgaggatgtcgcccgcgccgttgaagccgctggcggtgaagtatgtatgacgcgcgccgatcaccagtcagggacagaacgcctggcggaagttgtcgaaaaatgcgcattcagcgacgacacggtgatcgttaatgtgcagggtgatgaaccgatgatccctgcgacaatcattcgtcaggttgctgataacctcgctcagcgtcaggtgggtatggcgactctggcggtgccaatccacaatgcggaagaagcgtttaacccgaatgcggtgaaagtggttctcgacgctgaagggtatgcactgtacttctctcgcgccaccattccttgggatcgtgatcgttttgcagaaggccttgaaaccgttggcgataacttcctgcgtcatcttggtatttatggctaccgtgcaggctttatccgtcgttacgtcaactggcagccaagtccgttagaacacatcgaaatgttagagcagcttcgtgttctgtggtacggcgaaaaaatccatgttgctgttgctcaggaagttcctggcacaggtgtggatacccctgaagatcttgagcgcgttcgcgctgaaatgcgctaatttcacttcacgacacttcagccaattttgggaggagtgtcgtaccgttacgattttcctcaatttttcttttcaacaattgatctcattcaggtgacatcttttatattggcgctcattatgaaagcagtagcttttatgagggtaatctgaatggaacagctgcgtgccgaattaagccatttactgggcgaaaaactcagtcgtattgagtgcgtcaatgaaaaagcggatacggcgttgtgggctttgtatgacagccagggaaacccaatgccgttaatggcaagaagctttagtacgcccggaaaagcccgacaactggcatggaaaaccaccatgctggcaagaagtgggactgtccgtatgccgactatttatggtgtgatgacgcatgaagaacaccccggccccgatgtcctgctactggagcggatgcgtggtgtttcggtggaggcaccagcccgaacaccagaacgctgggaacaactcaaagaccaaatcgttgaagccttactggcctggcaccgtcaggacagtcgcggttgcgtcggcgcggtcgacaatactcaggaaaatttctggccctcatggtaccggcaacatgttgaagtgctatggaccacgctcaatcagttcaataacaccggtctgacgatgcaggataagcggatcctgtttcgcactcgcgaatgtctcccggcattatttgaaggctttaacgacaattgtgtgttgattcacggtaacttctgtttacgcagcatgctgaaagattcgcgcagcgatcagttactggcgatggtcgggccgggactaatgctttgggcaccgcgagaatacgaactgttccgactaatggataattctctggcggaagatttgctctggagttacctgcaacgcgcgccagtggcggagtcgttcatctggcggcgttggttgtatgtgttatgggatgaagttgcgcaactggttaataccggacgatttagtcggcgcaacttcgatctggcatcaaaatcactcttgccgtggctcgcctgacggacctttcagccactgccagatgcggccaagcgtttcatagccaacacgatcgctatgcatcagccagaccggagaagggattgcccgttcccacggattaagcggcgagtcgatggccaactgattcgccggggctggtagcggatttaacccttcctgctgaaaaaagatcatcgcccgcggcagatgtgatgcggaggtcaccagcaggaaaggggcgtcaccaatcgcctgtttcactgccgcagcttcttcttcggtatcttttggcaaatccagggtgataatttgctcgcgcggcacgcccagcgattgcgcaactctggcacctacttccgctgtactcaccgtattggtttttgctacgcctcccgtgaagatcagttttgatcccggattttcgcgccataagcgaataccttcattcaggcgtggcagactgttattgattaaattagagctcggtgcccactgcgggttccaggtataaccacctccgagcaccacgatatagtccactttttgcgaattattccatgtcggataggtgctttcgatgggacgcagcaggcggtcggctaccggttgcaaactcaataacaagagtgccagccacccaatgctaataaaaatcttcccggttttttgaaaacggctaaaccacagcagcgccaggccagcgccaataattaacaacatcagcggaagtggcagcaacatattgccaatcacttttttcagtgtaaaaagcatcctttctggttccttttttaaccatatagcaagggatcgccagcgatattacaccagacgggttcattctcgccgtggctgtgacaaaatagcgtctttatcagaaaacgtcttagccaaccggtggagaaagcaatgcaggatcgcaattttgatgatattgcggaaaagttttcccgtaacatttacggcaccaccaaagggcagcttcgacaggctattctgtggcaggatctcgatcgcgtgctggcggaaatgggcccgcaaaaactgcgtgtgctggatgctggcggtggagaagggcagaccgcaatcaaaatggccgagcgtgggcatcaggtcattttatgcgatctttctgcgcagatgatcgaccgcgcaaaacaggcggcagaagcaaaaggtgtgagcgacaacatgcaatttatacattgcgccgctcaggatgttgcttcgcatttggaaacgcccgttgatctgatattgttccatgcggtgctcgagtgggtggccgatccccgcagtgtattgcagaccctgtggtcagtgttgcgtccaggcggcgtgttgtcgttaatgttctacaatgcgcatggtttgttgatgcataacatggtcgccgggaattttgattacgtgcaggcgggaatgccgaaaaagaaaaaacggacgctttcgccagattatccacgcgacccggcgcaggtttatctgtggctggaagaagctggttggcaaattatgggtaagacaggcgttcgcgtgtttcatgattatctgcgcgagaagcaccagcagcgcgactgctatgaagcattacttgaattagaaacgcgttattgccgtcaggaaccgtatattaccctggggcgttatattcatgtcaccgcgcgcaaaccgcagagcaaggataaagtatgagtgaattttcccagacagtccccgaactggttgcctgggccagaaaaaatgacttctccatctcgctgccggtagaccgactctcttttctgctggcggttgccacgctgaacggcgagcgtctggatggtgagatgagtgaaggcgagctggtggatgcattccgccatgtgagtgatgcgtttgagcaaaccagcgaaaccatcggcgtgcgcgccaataacgcgatcaacgacatggtgcgtcaacgtctgctgaaccgctttaccagcgagcaggcggaagggaacgcaatttaccgtctgacgccgctcggcatcggcattactgactactacatccgtcagcgcgagttttctacgctgcgtctttctatgcagttgtcgattgtggcgggtgagctcaaacgcgcagcagatgccgccgaagagggcggtgatgaatttcactggcaccgtaatgtctatgcgccactgaaatattcggtagcagaaattttcgacagtatcgacctgacgcaacgtctgatggacgaacagcagcagcaggtgaaggacgatatcgcccagttgctgaacaaagactggcgggcggcgatttccagctgtgaattgttgctttcggaaacttccggaacgctgcgtgaattgcaggatacgctggaagcggcaggcgacaaattgcaggctaatctgttgcgcattcaggatgcgacgatgacccatgacgatctgcatttcgtcgatcgtctggtgttcgatctgcagagcaaactcgatcgtattatcagttggggccagcaatccatcgacttgtggattggctacgaccgccacgtacacaaatttattcgtaccgcgatcgatatggataaaaaccgcgtctttgctcagcggttacgtcagtcggtacaaacctatttgatgagccgtgggcgctaacttatgccaatgccgatcgtctgctggatatgcgtgacgaagagatggcactgcgcgatgaagaagtgactggggaacttcctgaggatctggaatacgaagagtttaacgagatccgcgaacagctggcggcgatcatcgaagaacaacttgccgtgtacaaaaccagacaagtgccgctggatcttggtctggtggtacgcgaatatctgtcacagtatccgcgtgcacgtcactttgacgttgcgcgcattgttattgatcaggcggtacgtcttggcgtagcgcaagcagatttcaccggactgccagcgaaatggcagccgattaatgattacggagccaaggtacaggcgcatgtcatcgacaaatattgaacaagtgatgccggttaagctggcgcaggcgctggcgaatccgttatttccggcgctggacagcgccttacgttcaggccgccatattggcctcgacgaactggataatcatgcattcctgatggattttcaggaatatctggaagagttttacgcgcgttataacgttgagcttattcgcgcaccggaagggttcttctatttacgcccacgttccaccactcttatcccgcgttccgtcttgtcggaactggatatgatggtcgggaaaatcctctgttatctctatctcagcccggaacggctggcgaatgaggggattttcacccagcaggaactgtacgacgaactgctcaccctggccgatgaagcaaaactgctgaaactggtgaacaaccgttcaaccggttcagacgttgaccgtcagaagttgcaggagaaagtacgttcttcgctcaaccgtctgcgtcgtttaggcatggtgtggtttatgggccacgacagcagcaagtttcgcattaccgaatcggtgttccgcttcggagccgatgtgcgtgctggcgacgatccccgtgaagcacagcgtcgcctgattcgtgatggcgaagcaatgccgattgaaaatcatctgcaactcaacgatgaaaccgaagagaatcagccagatagcggagaggaagaataatgattgaacgcggtaaatttcgctcactgacgctgattaactggaacggcttttttgcccgaacttttgaccttgacgagctggtcacgacgctttctggcggtaacggggcgggtaaatccaccaccatggcggcgttcgttacggcgctgatccccgacctgaccctgctgcatttccgtaacactacggaagccggggccaccagcggttcgcgcgataaaggtctgcacggtaagctgaaagcgggtgtctgttattcgatgctcgacaccattaactcgcgccaccagcgcgtggtggtcggtgtgcgtctgcaacaggttgccggacgcgatcgtaaagtggatatcaagccgtttgccattcagggactgccgatgtcggtgcagccgacacagctggtgaccgaaaccctgaacgaacgccaggcgcgcgtgctgccgcttaacgagctgaaagacaagctcgaggcgatggaaggcgtgcagtttaaacagttcaactccattactgattaccactcgctgatgttcgatctgggcatcatcgcgcgtcgtctgcgctccgcatctgaccgtagcaaattctatcgtctgatcgaagcttcgctgtatggcgggatctccagtgccattacccgttctctgcgcgactacctgttgccagaaaacagcggcgtgcgtaaagcgttccaggacatggaagcggcgctgcgtgaaaaccgtatgacgctggaagcgattcgtgtcacccagtcggaccgcgacctgtttaagcatctgatcagcgaagccaccaactacgtggcggcggactacatgcgtcacgccaacgagcgccgtgtccatctcgacaaagccctggagtttcgtcgcgagctacatacttcgcgtcagcaactggcggctgagcagtacaaacacgtcgatatggcgcgtgagctggcagagcacaacggtgccgaaggcgatctggaagcggattatcaggcggccagtgatcacctgaacctggtgcaaaccgcactgcgtcagcaggagaagatcgaacgctacgaagcggatctcgatgagctgcagatccgtctggaagagcaaaatgaagtggtggcagaagccatcgaacgccaggaagagaatgaggctcgtgcggaagctgccgaactggaagtggacgagctgaaaagccagcttgctgactaccagcaggcgctggacgtccagcaaacgcgcgcgatccagtataaccaggcgattgctgcgcttaatcgtgccaaagaactgtgccatctgccggacttaaccgccgactgcgccgccgaatggctggaaaccttccaggcgaaagagctggaagcgactgaaaaaatgctctctcttgagcagaaaatgagcatggcgcaaaccgcgcacagccagtttgagcaggcttatcagctggtggtggcaatcaacggcccgctggcgcgtaacgaggcgtgggatgtcgctcgcgaactattgcgcgaaggggtcgatcagcgtcacctggcagagcaggttcaaccgttgcggatgcgcttaagtgaactggaacagcgtctgcgcgagcagcaagaagccgaacgcctgctggcagacttctgcaaacgtcagggcaagaattttgatattgatgaactggaagctctgcatcaggagctggaagcgcgcattgcctctctttccgatagcgtgtctaacgcccgtgaagagcgcatggcactgcgccaggaacaggaacagctgcagtctcgcattcagagtttgatgcagcgtgcgccggtttggctggcagcgcaaaacagtctcaaccagttgagcgagcagtgcggtgaagagtttacctccagccaggacgtcaccgaatatctgcaacagttgctggagcgtgagcgagaggcgattgttgaacgcgatgaagtgggcgcgcgcaaaaacgctgtcgatgaagagatcgaacgtttaagccagcctggcggctctgaagatcagcgtctgaacgcgctggcggagcgttttggcggcgtgctgctgtcagaaatttatgacgacgttagcctggaagatgcgccgtacttctcagcgctgtatggcccgtcacgccacgccatcgtggtgccagatctgtcacaggtaactgaacacctggaaggcttgaccgattgcccggaagatctctatttgatcgaaggggatccgcagtcattcgatgacagcgtgttcagcgttgatgagctggaaaaagcggtagtggtgaaaatcgccgatcgtcagtggcgttattcacgtttcccggaagtgccgctgtttggtcgtgctgcgcgtgaaagccgtattgaaagcctccatgccgagcgtgaagtgctttccgaacgcttcgccacgctctcctttgatgtacagaaaactcagcgtctgcatcaggcgttcagccgctttatcggcagtcatctggcggttgcgtttgagtctgacccggaagcagaaatccgtcaactgaacagccgtcgcgtcgaactggagcgggcgttgagtaatcatgaaaatgataaccagcagcagcgtattcagtttgagcaggcgaaagaaggcgttacggcgctgaaccgcattctgccgcgtctcaacctgttggctgatgacagcctggcggatcgcgtcgatgaaatccgcgaacgtctggatgaagcccaggaagccgcgcgttttgttcagcagtttggcaatcaactggcgaaactggaaccgatcgtttcggtattgcagagcgacccggaacagttcgaacagctaaaagaagattacgcgtactctcagcagatgcagcgcgatgcccgtcagcaggcgtttgccctgacggaagtggtgcagcgtcgtgcgcactttagctattctgactcggcagaaatgctgagcggtaatagcgatctcaacgaaaagctgcgtgaacgtctggaacaggcggaagcggagcgtactcgcgctcgtgaagcgttgcgtggtcacgcagcgcagttgagtcagtacaaccaggtgctggcttcgctgaaaagttcttacgacaccaaaaaagagctactcaacgatctgcaacgtgaattgcaggatatcggcgtgcgcgccgatagcggggcagaagagcgggcgcgaattcgccgtgacgagctgcatgcgcaactgagtaataaccggtcccgccgcaaccagctggaaaaagcactgactttctgcgaagcggagatggacaatctgacccgcaaactgcgcaagctggagcgggattactttgagatgcgcgagcaggtagtgaccgccaaagcgggctggtgtgcagtgatgcgcatggtgaaagataacggcgttgaacggcgcttacaccgtcgcgagctggcttatctctccgctgatgatttgcgctctatgtcggataaggcattgggtgcgctgcgtctggcggtggcggataacgaacatctgcgcgacgtgctgcgcatgtcggaagatccaaaacgtccggaacgtaaaattcagttcttcgtggcggtttatcagcatctgcgtgaacgtattcgtcaggatattattcgtaccgatgatccggtggaagccatcgagcagatggaaatcgaacttagccgactgaccgaggagttaacctcccgcgaacagaaactggcgatcagttcccgcagcgtggcgaacatcattcgcaaaaccattcagcgcgagcagaaccgtatccgtatgctcaaccaggggttgcagaacgtatcgtttggtcaggtgaacagcgtacgtctgaacgtgaacgtgcgtgaaacgcacgccatgctgctggatgtgctctctgaacagcacgagcagcatcaggatctgtttaacagcaaccgtctgaccttctcggaagcgctggcgaaattgtatcagcgtcttaatccgcagattgatatggggcagcgcgcgccgcagaccattggcgaagaactgctggattaccgcaactatctggaaatggaagttgaggttaaccgtggttccgatggctggttgcgcgcagagtctggtgcattgtcgaccggtgaggcgattggtaccggtatgtcgattctggtgatggtggtacaaagctgggaagatgaatctcgccgcctgcgcggtaaagatatctctccttgccgcctgctgttcctcgatgaagcagcgcgactggatgctcgttctatcgccacgctgtttgaattgtgtgaacgtttgcaaatgcagctcatcatcgcagcgccggaaaatatcagcccggagaaaggcaccacctataaactggtgcgtaaagtcttccagaataccgaacacgttcacgtcgtcggcctgcgaggatttgcgccgcaactccctgaaacgcttccaggaagtgacgaagcgccttctcaggcgagttaaaattaaggcggcagcaatgccgccttttctttttccgaaaactccgtttccgcactaaaaaagtggcacattacggcgcgcttttctttaaacttctttacattaggttatgtaaaaacgtatcggcgtttatatactgaagataagcctgatgagtaacaggcttgctcgtcatactttcgtgagtattggcgttgtacaggcaagtcgtaaaataacagcctggctattcagagtatgataaaaacagggggcaagggatgttgcttaatatgatgtgtggtcgtcggctgtcggcaatcagtttgtgcctggccgtaacattcgctccactgttcaatgcgcaggccgatgagcctgaagtaatccctggcgacagcccggtggctgtcagtgaacagggcgaggcactgccgcaggcgcaagccacggcaataatggcggggatccagccattgcctgaaggtgcggcagaaaaagcccgcacgcaaatcgaatctcaattacccgcaggttacaagccggtttatcttaaccagcttcaactgttgtatgccgcacgcgatatgcaacccatgtgggaaaaccgtgatgctgttaaagccttccagcaacagctggcagaggtggcgattgccggtttccagccgcagtttaataaatgggtagagttactgaccgatcctggtgttaacgggatggcacgcgacgtagtgctctctgatgcgatgatgggctatctccatttcattgcaaatattccggtcaaaggcactcgctggctatatagcagtaaaccttatgcacttgcaacgccgccgctctcggtgattaaccaatggcagctggcgctggataaaggtcaattgcctacgtttgttgcaggactggcaccgcagcatccgcaatatgcggcgatgcatgaatcgttactggccttactcagtgacaccaaaccgtggccccaactgaccggcaaagcaacgttgcgcccagggcagtggagtaacgacgtaccggcgttgcgcgaaatattgcaacgcacaggcatgttggacggggggccgaaaattactctacctggcgatgacacgccaactgacgcggtagtcagcccatccgctgttactgttgaaacagcagaaactaagccgatggacaagcaaacgacgtctcgtagtaaacctgcgcctgccgttcgtgccgcctacgataatgaactggtggaagccgttaaacgttttcaggcatggcaaggattgggggcagatggtgctattggcccggcaacacgtgactggttaaacgtaacgcccgcccagcgtgctggcgtgttggctctcaacatccagcgattgcgcttgctgccaacagagctttctaccgggatcatggttaacattccggcctattcgctggtctactatcagaacggcaatcaggtgctggattcgcgagtcattgtcggtcgccccgatcgcaaaacgccgatgatgagcagtgcccttaacaacgtagtggtaaacccgccgtggaacgtacctccaactctggcacgcaaagatattctgccaaaagtgcgcaacgatccgggatatctcgaaagccatggctatacggtgatgcgcggctggaacagcagagaagcgattgatccatggcaggttgactggtctacaatcacggcctcgaatttaccgttccgcttccagcaggctccaggcccacggaactcgctggggcgctataaattcaatatgccgagttcagaggccatttatttgcatgacacgccgaaccacaatctgttcaagcgtgatacacgcgcattgagctcaggctgtgtacgagtgaataaagcttccgatctggcgaatatgctgttgcaggatgcaggctggaatgacaaacgtatttctgatgcgctgaagcagggtgatacacgttacgtcaatattcggcagtcgattccggtgaatctctactacctgacggcctttgttggtgcagatggtcgtacccagtatcgtacagatatttacaattatgatctgcctgcgcgatccagctcgcaaatcgtatcgaaagcggaacaattaatcaggtaaatgaagtagttcggggaaatcagttgtcgtaataattagcatgattgggggcgattctctgcagcccccgtcactgctggggttgagtcatcttgacgtctgctttacgggcggttaaggtgcctcttgtgcgccagaagtgcatataaacgataacattgacctgtagacttgattatcatggacaaattcgacgctaatcgccgcaaattgctggcgcttggtggcgttgcactcggtgccgccatcctgccgacccctgcgtttgcaacactctctaccccacgcccgcgcattttgacactcaataatcttcataccggagagtcaatcaaagcggagtttttcgatggcagaggctatattcaggaagaattggcaaaacttaaccattttttccgcgattaccgcgcgaacaaaataaagtccatcgacccaggattattcgaccagttgtatcgcctgcaagggttgttaggcacgcgcaaaccggtgcaactcatttccggttatcgttccattgataccaacaatgaactacgcgcccgcagccgtggagtagcgaagaaaagctatcacactaaaggccaggcgatggatttccatattgaaggtatcgcgttaagcaatattcgcaaagccgcgttatctatgcgcgcaggtggtgtaggatattacccacgtagtaactttgtgcatattgataccgggccagcacggcactggtagtaattgcttaacgaaacaggggcagtatgaactatcgtattattccggtcaccgcattctcccagaactgttcattgatctggtgtgaacaaacccgcctggccgcactggtcgatcctggcggcgatgcggaaaaaatcaaacaggaagttgatgacagcggcctgacactgatgcagatcctgctgacgcatggtcatctggaccacgttggtgcagcggcggaactggcgcaacattacggcgtgccggtttttggtccggaaaaagaagatgagttctggctgcaaggcttgcctgcgcaaagtcgtatgtttggtctggaagagtgccagccgctgacgccagatcgttggctgaacgaaggcgataccatcagcatagggaatgtgactttacaggtgttacattgccctgggcatacgccgggtcatgtcgtgttttttgatgatcgggcaaagctgctgatttctggcgatgttattttcaaaggcggagtagggcgcagtgacttcccgcgtggcgatcataatcaactgatttcttcaatcaaagataaattgctgccactgggggatgacgtgacatttattccgggtcacggaccattatccacacttggttatgaacgcctgcataatcccttcctgcaagacgaaatgcccgtctggtaaggcacataaaaaagcccgcttttaatgcgggcctggatttctgacaaagtgcgctttgtttatgccggatgcggcacgagcgccttatccggcctacaaaatcgtgcaaattcaaaatattgcaggggacgcgtagatactgttatggcctgcaagttttttcctggtccggtttcccggattgcaggcatgccagacacagcgccgtcaggcgctgtttttttcatcccttccgcgatttttacgccgctaccggattatgccgtgacgcatcgaacggcacgcctgacttcagcactccatacgccacctgtgccagcttgcgcatcatcgcgccgagaatcacctttcctttcttgccattagccgccagacggtcgcggaacgcccgtccccactcagtcttactggtggctaccattgcgggcatatacaacgccctgcgaagcgacacatgtccggccttactcatccggctcgcccctctcacactgctacctgattcataacgccgtggtgtcagacccgcaaaagcggcgaactgtctggcatgggcgaagcggtccttcagaccgatataagccagcaataccgcagatgttttctctccgatacccgggatgctttccagcagtttcctgcggtgtttcatatccggatcatcgtctgtcaggtcttttatctgcttctcaagacgcttcagctctgcttcaagccacagaaggtgagcatcaatgctcggtctctggacttcccgcgccgtttcagtgcgattcagttcctgcgtgtgcatatctgtcagcgcctggtggcggactaccagggcacgcaacgcgcgttcaagcgggtgaggcgcttcccaggctgcagggcgcttctgacgacagaactctgccagcatgcgcgcatccacggtatcagtcttgttacgcagtccttcactctgagcgaaagctttacccagcgcaggattaatgactgacactatgtagccagcatcgtaaaggcactcagcgacaggttccatataggtgccggtcgcttcgatgcagatatgcgcatggtcaatcttgtgacctttcagccagctcaccagctcatcgtgccctttagtggtgttagcgaattttttggtgcgatgacgaccatcaggacgcaacacatcgacatccagtttctctttagcggtgtcgataccgatataatgaagttcatgttccatagtgaaaccaaccttgcaaatacggattaccgggaaaaccggtccatgatactgtccggtttatcactttgggagaaaggcagtccgctgcataaatctacgcaacaggttagaacccaaggcccgatacggcatgcggactgcaggcagagaaaactggccgattttctctgcactggagggataatacaaggcctgataagcgtagcgcatcaggcaatgttgcgtttgtcatcagtctcagcccgcttttcagcgggcttcattgtttttaatgcttacagcactgccacaatcgcttcgcacagcggagccatgttatctggtgtcatcccggccacatttacgcgaccagaagcaaccgcatatacgccaaactcttcgcgcagacgcagcacttgttcttttgtcaggccactgaaggagaacatgccgttctgtttgatgataaagctgaagtcgcggtttgcgcctttttcctgcagcgtattgacgaacaactgacgcatacgctgaatacgctggcgcatatcagtcagctcttgttcccaaatcgcacgtaacgcatcgttgctcaggatggtggcaacaacagaagcgccgtgtgctggtgggttagagtagttagcgcgaatcgccgctttcatttggctgaatgcgcgatcaacggtttcactgtcggcagcaaccagagtacaagcgccaacacgctcgttgtacaggccaaagtttttagagtaggaactggcaacaatcagctctttatgcatagccgcgaaagcgcgcagtccttcagcatcttcttccagaccacgggcaaaaccctggtaagcgaagtcaaacagcggtaaccagcctttctcaactgagagttgtgccagtgtctgccattgttccagcgtagggtcgataccggttgggttatggcagcagccatggaacagcactacgtcgccagcctgagcttcgttcaggctgttaatcagtgcatcgaagtcaagagtgtgattttccgcatcataataagcgtattcacgaacttccagacctgcagagttaaagacgctcttatggttcggccagcttgggttgctcacccacactcgcttaacgctggtatttttgccaggaaatcggcagctacgcgtagtgcgccagtgccccccggagtctgtgccgtgcgagcacgtttgtcattgatcagggcgctacctttaccaaacagcagttcctgagtgcagcgaccaaattcagggatgccgtcaatgccgaggtaatttttggtggtttcattttcgagcagatactgttcagcctttttcacgctggtcagtaccggggttttgcccgtctcatctttatagacaccaatcccgaggttaattttgccgggacgttcatcggcacgaaacagatcggccaggcccagaatcgggtcggcaggagcggcggtaatgttctcaaacatgacgaggttccattatggttacagaagggaagtccgctatcagggtaacgggagatttacaaaattccaactattactgatgaaaacgcaggctgtttttgcaagacgtgagattgctctggaaggtataaaaaaaacaggaccaaagtcctgttttttcggcatttaacaaagaggtgtgctattagaactggtaaacgatacccacagcaacggtgtcgtctgaacctacgcccagtttgttgtcagaatcgatctggttgatgatgtagtcaacataggtggacatgtttttgttgaagtagtaggttgcgcccacttcaaagtagttcaccagatcaacatcaccgataccttctacgtctttcgctttagatttggtgtaagcgatggacggacgcagaccgaaatcgaactggtattgcgcaactaacagaacgtcttgcgttttgttggcgaagccgctggtgtttgtaaatttattagtgatcggcgtagcgttacgggtttcaccgtagttcgctgccaggtagatgttgttcgcgtcgtacttcagaccagtagcccactgttcagcttttttaccgttgccaagaggttgagcttcttgcaggttggtacggtcagctgcaccataagcaccaacgataccaaagccttcgtattcgtagctgatagaaccgccaacaccgtcgccgttagaacggcgtgcagtgtcacgctcgtttttacccaggtactgaacagcgaagttcaggccatcaaccagaccaaagaagttggagttacgataggtagcaacgccgccaacacgaccaacgaagaagtcatcgctgtatgcagtatcaccaccaaattctggcagcatatcggtgtaacccagtgcatcataaaccacaccgtagttacggccgtaatcgaaagaaccaacgtcagcgtatttaagacccgcgaatgccagacgcgttttgttaccagtttgagcgtcagcgccttcagagttgttaccctggaagttatattcccactgaccataaccggtcagatcggaattgatttgagtttcccctttaaaaccaagacgggcataggtcatgtcgccattgccaccgtaactgttttcaccgttacccttggaaaaataatgcagaccaacagctttaccgtacagatctactttgttgccatctttgttatagatttctgcagcgtttgcagtacctgctactaacagagcagggacgatcactgccagaatattgcgcttcatcattatttattaccctcatggttttttttatgacacctgccactgccgtcaataagttctgtcaataaaaatttacggaactattgatgagagtttggtgtctttatgtgtctgcaggcatctttccattcaaactaacgtttcgctaccgtgaaagtgctacaaagataaagatttagtttcaaaaagaaaaaatatgtaaccaaaagtaaaaattaaggaactttgtgaacaccgtcatatttccatagaaacgtgatgatatttacagcaatttttatctatttatatgatttacttatatttaaattaactaaacggaaattttgtttctgatggaaactttatcgacctggcacaaaatcctctttcagacatccagaatgccaaaaaatagtatgaaaattgtgctatcagctaagaaaaaactaatccgcaataagaatgcggtttattttttgtgcgtaaatgttgcaatgtaatattccgtaacaggatgatcgttatggcggggttgcaaatagattgcttgacttaacaaacagataacttgacagaaaggataaaaaagagccagcaggcgctggctctttgaggaagaaaatcagaagctggcgttgcgcggagtacgtgggaacggaatcacatcacgcacgttttgcacgccagttacgtaagcaatcaggcgttcaaaaccaagaccgaaacctgaatgcggaacagtaccgtagcgacgcagatcgcgataccaccagtaatcttctttattcaggcccatttccagcatacgctcgtccagaacgtccagacgttcttcacgctgggagccaccaatgatctcaccgatgcccggagccagaacgtccatagccgcaacggttttaccgtcttcgttgaggcgcatatagaacgctttaatatctttcggatagtttttaaccactaccggtgctttaaagtgttcttccgccagataacgctcatgctcagaagagagatcgacgccccagtaaaccgggttttcaaacttcctgccgcagttttcgagaatggtcactgcgtcggtgtaatccacctgcgcgaaatcggcctcaatgaagcgttccagacgtgaaacggcatctttatctacgcgttcagcgaagaatttcatgtcgtctgcgcgttcttcgagaaccgctttgaagacatatttcagcatggcttcagccagacccgcgatatcgttcaggttagcaaacgccacttccggctccagcatccagaattccgccaggtgacggctggtgttggagttttcagcacggaaagtcgggccgaaggtataaattttggataatgcgcaagcgtaggtttcgccgttcaactggccagatacggtcaggaaagactctttaccaaagaagtctttgtcgaaatccactttgccctgatcgttacgcggcaggttttccagatccagcgtagaaacgcggaacatttcgcctgcaccttcggtatcagatgcggtaatcagtggcgttgaaacccagaagaatccctgctcgttaaagaagcgatgcagcgcctgcgccagcgtatggcgaacgcgcgcgacggcaccaatcaggtttgtgcgcggacgcaggtgagcgacttcacgcagatactcaatgctgtggcgttttgccgccatcgggtaagtgtctggatcttcaacccaaccagcaacttcaactttgctggcctgaatttcaaattgttgcccctggcccggcgacgccacgactttacccgtcacaatgaccgagcagccggtggtcagacgcaggacgtcttcattgtaattgggcagagaattattgatgacagcctgtacaggatcaaagcaggaaccgtcataaacggcgaggaaggagatgccagcttttgaatctcggcgggtacgtacccatccgcgtacggtgacttcgctgtcaacggctacgcggccctggagtacgtcggctacaggcacaacgctcataatattctctctgttaatagtcggaaaaaataaacacttgtccacccgtaaatggggggatacctatgttacctggcatctgcaatcagacaagcagaattcgcaaatgcagcgaaagatttcggaattaaaggtaaaaaaagggagccgattagctccctgatgatattaactggcttttttaatatgcggaaggtcgaacgctttgcgcagcgcccgaacaaacgctttatcgtggcagatagttttgccagggctgtcagaaagtttcgccaccggtttaccgttacactctaccaacttaatcacaatattcaggggttttacctgggggatatcgcaggttaggcgagtcccaataccaaaacttaattgcacgcgggaagagaagtggcggtatagctcaaccgctttgcgtaaatccagattgtcagagaaaaccagcgttttactctgtggatcaattcccagcttttcataatgtgcaatggctttttcaccccattcaaccgggtcgccagagtcatgacgcaggccctgataccgactagcgaactcgacaccgaaatcacgcaggaaagcatccatagtgatgcagtcggttaatgcaatgccaagttggtcgggatactcttccagccaggcagcaagtgcagctcgctggctgttggctagatccgggctgatttgctgatgtgcctggaaccattcgtgtgcctgtgttcccatcggcgtgagggaaagccgacgcgccagatcgtagttgctggtgcccacgaaccaggattcctgttgcagacgcttaacgatggtttcttgtacttcgcgagaaaaacggcgacgggtgccaaaatccatcagatggaagcgcgacatatcaagaccggcggttaacgccgagaagtcgactaatttgctttccagcgtgtcgagggcttgcgcaacgtcggcctgcggtgagcgatagcgatgtaccatttcactgataaccgccagcaaaggaacttcccagaggatgacttcacgccacggaccgcttaagcgaatatccagcttgccattatcgttggacacggtgacttgttccgggttaaagcggaactcgcgtaaccagttaagatagtcggccttaaagaaaggcagggcagagagccactgatattcatcatcctgcaggcgcaggtgctgcatcgcctgaatctgttcacgaatagcatcggcataaatacccagcagatcgtcacctcggcaacgaaactccgccgcgacatgcacatcgtaatagtgatgaaacacggcttgctgcatatgcaacttataagcatctgtatccagcaacgagtgcagaacaggagaagcgaattgtgtcataggtgcgcagtagcgtcctcgtacaggagcgtttagtacaataaacatcttcaggaactgctggagtataccttgtttcgcaatttattgaaccccgatcacaccatatgccacctttctggtcgatggcattacgcggtgtatgttataaaaatgtagcaataaaggcgtttgtacctgaaaagatgaagattctgcatagcgcgatttacgcaacaggaatagactgaacaccagactctataaaagatgctaaaggttatttatgactcaacagccacaagccaaataccgtcacgattatcgtgcgccggattaccagattactgatattgacttgacctttgacctcgacgcgcaaaagacggtcgttaccgcggtcagccaggctgtccgtcatggtgcatcagatgctccgcttcgtctcaacggcgaagacctcaaactggtttctgttcatattaatgatgagccgtggaccgcctggaaagaagaagagggcgcactggtcatcagtaatttgccggagcgttttacgcttaagatcattaatgaaataagcccggcggcgaatacggcgctggaagggctttatcagtcaggcgatgcgctttgcacccagtgtgaagccgaaggtttccgccatattacgtattatctcgaccgcccggacgtgctggcgcgttttaccaccaaaattattgccgataaaaccaaatatcccttcctgctttccaacggtaaccgcgttgcgcaaggtgaactggaaaacggacgccattgggtacagtggcaggacccgttcccgaaaccgtgctacctgtttgcgctggtggcaggcgactttgatgtactgcgcgacacctttaccacgcgttctggtcgcgaagtggcgctggagctgtacgtcgatcgcggcaaccttgatcgcgcgccgtgggcgatgacctcgctgaaaaactcaatgaaatgggatgaagaacgcttcggcctggagtatgacctcgacatctatatgatcgtcgcggtggatttcttcaatatgggcgcaatggagaataagggtttgaatatctttaactccaaatatgtgctggcccgcaccgacaccgccactgacaaagattacctcgatattgaacgcgttatcggccatgaatatttccataactggaccggtaaccgagtcacctgccgcgactggttccagctcagcctgaaagaaggtttaaccgtcttccgcgatcaggaattcagctctgaccttggttcccgcgcggtaaaccgtatcaataatgtgcgcaccatgcgcggattgcagtttgcggaagacgccagcccgatggcgcacccgatccgcccggatatggtcattgagatgaacaacttctacaccctgaccgtttacgagaagggcgcggaagtgattcgcatgatccacaccctgctgggcgaagaaaacttccagaaagggatgcaactctatttcgagcgccatgatggcagcgcggcaacctgcgacgactttgtgcaggcgatggaagatgcgtcgaatgtcgatctctcccatttccgccgttggtacagccagtccggcacgccgattgtgaccgtcaaagacgactacaatccggaaaccgagcagtacaccctgaccatcagccagcgcacgccagccacgccggatcaggcagaaaaacagccgctgcatattccatttgccatcgaattgtatgacaacgaaggcaaagtgatcccgttgcagaaaggcggtcatccggtgaattccgtgctgaacgtcacccaggcggaacagacctttgtttttgataatgtctacttccagccggtgcctgcgctgctgtgcgaattctctgcgccagtgaaactggaatataagtggagcgatcagcaactgaccttcctgatgcgtcatgcgcgtaatgatttctcccgttgggatgcggcgcaaagtttgctggcaacctacatcaagctgaacgtcgcccgtcatcagcaagggcagccgctgtctctgccggtacatgtggctgacgctttccgcgcggtgctgctcgatgagaagattgatccggcgctggcggcagaaatcctgacgctgccttctgtcaatgaaatggctgaactgttcgatatcatcgacccgattgctattgccgaagtacgcgaagcactcactcgtactctggcgactgaactggcggatgagctgctggctatttacaacgcgaattaccagagcgagtaccgtgttgagcatgaagatattgcaaaacgcactctgcgtaatgcctgcctgcgcttccttgcttttggtgaaacgcatctggctgacgtgctggtgagcaagcaataccatgaagcaaacaatatgaccgatgcgctggcagcgctttctgcggcggttgctgcacagctgccttgccgtgacgcgctgatgcaggagtacgacgataagtggcatcaggacggtctggtgatggataaatggtttatcctgcaagccaccagcccggcggcgaatgtgctggagacggtgcgtggtctgttgcagcatcgctcatttaccatgagcaacccgaaccgtattcgttcgttgattggtgcgtttgcgggcagcaacccggcagcgttccatgccgaagatggcagcggttaccagttcctggtggaaatgcttaccgacctcaacagccgtaacccgcaggtagcttcacgtctgattgaaccgctgattcgcctgaaacgttatgatgccaaacgtcaggagaaaatgcgcgcggcgctggaacagttgaaagggctggaaaatctctctggcgatctgtacgagaagatcaccaaagcactggcttgatacttttgagccaaaatgcctgatgcgacgcttgacgcgtcttatcaggcctacaactccgttgaaattgctggttttgtaggctggataaggcgttcacgccgcattcggcagccgtgcccaactgcctgatgcgatgcttgacgtgtcttatcaggcctactagtccgttgaaaatgctggttttgtgcgccacatccggcatattaaccatgacgccgaatcagttgttcagaatgcccacgccgcattacccgttgcaatacttccgcttccagctccgctaatcgcaccgaccctaatcgacgcggacgggggatatccactgtcaaatccagaccaatttttccctcttcaattaacaacacccggtcagccattgctaccgcttcgctcacatcatgcgtcaccaacagtacggtaaagccgtgctgctgccaaagtgacacaatcaaatcctgcatctcgagtcgcgttaaggcgtccagcgccccgagcggttcatcaagcaacaataaacccggtcgatgaatcaacgctcttgccagcgccacacgctgtttctgcccgccagaaagtgcggcaggccattccccggcgcgattctccagtcctactgcagccaacgcccgacgcgcggcatcgcgccactggcctttaaggcctaacccaacgttatcaatcaccgatttccacggcagcagacgcgcatcctgaaacatcattcgcgtgtcttcctgaatctcagccagcggtgtggtgcccgctaacacatcgcctgcggttggcgtttccagacctgccagcaggcgcagcagggtacttttgccaccaccgctgcggcccaccaccgccacaaactgacctgccggaatatgtaaatccagttggttcaggacgatattttccgcgtaatgtttgcttactgcattgagcaacaatggtgtgccctggttcagacgagcagtattcataccgtggcctccttcaaatgataagccgggttccagcgcaaccagaggcgctctaacagctgcgcgctgacgtcagcaagtttgccgagcagggcgtaaagaataatagcgactaccaccacgtccgtttgcaaaaactcccgcgcattcatcgccagataaccaatgcctgaattggcagaaatggtttcggcaacaatcagcgtcagccacatcaggcccaacgcaaaacgcacgccgaccataattgagggcagggcaccaggcaggatcacatggataaacagcggtatgccggataatccatagctacgcgccatttccaccagaccgcgatcgatattacggatgccatgccaggtgttgatataaatggggaatagcgtgccgagcgccaccagaaagatttttgcggattcatcaatgccaaaccacaaaatcaccagcgggatcagcgccagatgcggtacgttgcgcaacatctgaattgaggtatccagcagccgttctccccagcgagatagcccgctaatcagtcccaaaatcaaccccagcgatccgccaattgaaaagccaatcagcgcccgccaggaactgatcgccagatgctgccacagttcgccgctggcggagagcgtccagaacgccgtcaccaccccttccggtgagggcaaaatacgcgtcgacagccagccaactgaggaggccagttgccacaccgccacgatgcccaccggtaaaaaccagggggcaacgcgcaataaccacttcttcactggcgttgccattatttcttccttagctttgcgcgactttacgggggataaaatcattcgccaccgcttcgccttgcggattcagcggctgcggctggggaatttccggaatggcgacatccagatgtgggaacagcaactcgccgacccgatacgcttcttccagatgcggatagcccgaaagcacaaagctgtcgatgccaagcgcggcgtattcgttgattcgcgcagcgaccgtaggaccatcgcccaccagcgccgttccggcaccgccgcgcactaagccaacgcccgcccataaattggggctgatctccagattgtcgcgcttgccgttatgtaacgccgccattcgctgttgtcctacggaatccgtccgggcgaatgcggcctgtgctttggcgatagtttcatcatcaagatgcgagattaaccgctcggcggcctgccacgcttcgtcgttagtttcacgaacaatcacatgcagacgaataccgaaacgaattttgcgtccatgcgcggcagctttcgcccgcacttgttcgatcttctcttttactagttctggcggttcgccccaggtgaggtagagatcaacttgttctgccgccagctcctgggcgacgtctgacgatccgccaaagtaaagcggaggataaggctgttgaatcggcgggaagagcagttttgctccgcgcacatgaatatgtttaccgttgaaattgacggtttcccccagcaataagcgccgccagacctgggtaaattccgccgaggcttcgtagcgctcgctatgatcaaggaacacgccgtcgcctgccagctcttgtggatcgctgcctgtgaccagattaaacaacgcacgaccatttgagagacggtcaagcgtggcggcctggcgagcggcaacggtaggtgaggttacgctggggcgcagggcgacaagaaacttcagccgctgcgtcaccgggatcatcgacgccgccaccagccacgcatcttcacacgatcgccccgttgggatcagcacaccggtatagcccagacgatccgccgcttgcgcaatttgttgcagataaccgtgatcaaccgggcgtgaaccttcttccgttcccagatagtgcccgtcaccgtgggtcggtaaaaaccagaacatattcagactcataattgttttccttccagttgagtgggctgccagatgcgctggcgaatatcgacttttttcggcaccagacgattttcataaaacagatctgccgtttgctgctgtaaggcggcaatctcggcgttaaccggtttgatggtggtaggagggcgatgatctaagtaagaggcaatcaccggtgccggtaagcccatcgtttttgccagtaaagcgatgctttgctcgcgctggctgcgggttaacgcatcggcctcactaaaggttgccagtacgccctgaataaaagcgccgtttttttctgcataggggcgagctgccagataaaacgatccggtttgattgagatcggtgccgtctttcaacacccgcacgccgccctgtaataacgcagcggagtagtagggatcccagatagcccaggcgtcaacgttaccttgctggaacgcggcgcgggcatcggcaggtgtcaggtaagtgggttgtatatcggtaaacttaagtccggcctgacgcagtgcacgcagtaaaaggttgtgtgaactggaacctttctgaaaggcaactttgtgacctttaagatcggctacggttttgatcgggctgttttctgccaccagaatcacttcggctttgggcttcggtggctcgacgcccacatataccaaatcagccccggcagcctgggcaaagattggcggaatatccccggtactgccgagatcaatactgccaacgtttaacgcttccaacatttgcggacccgcggggaactccacccaggagatttttgattgcggatagcgtttttccagtaactggtggctttttgccagcaccataccaatactgcctttctgatagcctatacgtaacgcttcaggcgaggattctgcagcaaccgcaaaagtagagacgctaagcaatcccgccagcgccagtttaatgatgttacgcatggacattacctcgcagagacagaaggtcaggaacctgaacatcgcggcggtgcaatgcctgccagaaagtttctagcgcggtatcaagacgggtttgcagatttggcgtgaactggggtctgtgatggtaatcaatgacttgtgagtcatcggcaaacacgccgtgcaggatctcctgggctttcagtgcgcttaaaactggtttaagggcataatcgaccgccagcagatgggccacggtaccgcccgtcgccagcggtagcaccactttgccttgcaaagcgcgctctggcagcaggtcgagcagggttttcagcgcgccggaataggcggctttatacacaggtgtagcgactatcagtccatcagcctgttgcagctgttcggtgaaggtcttgagtgccggactatcgaaacgagcataaagcagatcttccggggcgaagttttgcagattccagtgataaacctctacatcgaggccatttagtttttcccgcgcatattccagcaaggagctggagcgagaaggaaagcgaggactacccgccagggtgatgacacgcatactctctccttataaccaattgttctttttttgttaacattgagaacaattcggtcagtctgtcggagagacaagaaaatgccaaatataaattttgtgtatctttttctgaaaataaactaaagaaagggctttatatatcacgcatatttatttgttggatagtcattagatgttgaatcaatgaattactcgttcagttaatatttaaatattcatgaaatctataaattaaagatttgtcacttattggatttagtatgcttgatttaaatggcggtcaattattgttattattaagtctaatgtcatttaaaggcattatcatatttacgaagagatcaggatgatgacgatgaaaaaaagtgtattgacggcgtttataactgtggtatgtgcaacgtccagcgttatggcagctgatgataatgctatcacggatggcaaagtaacatttaatggtaaagttattgctccagcttgtaccctggtagctgcgacgaaagattcagtagtcacattgccaaatgtcagcgccaccaagttgcaaactaatggagcagtctctggcgttaaaactgatgtaccaattgccttagaaggctgtgatgttactgtaactaaaaatgcgacgtttacctttagtggtacggctgacggcgtgcaacctacagcatttgccaaccaggctaccaccgatgcagcgacgaatgttgctctacaaatgtatctgccagatggttctacatcggtaactcccggtaccgaaacgtcgaatattcagttagcggattctgctgagcaaacagtgacctttaaagttgattatatcgctacggggaaagcgacttctggtaatgtgaatgcggtaacaaatttccatattaactattattaatagaactcattaattgttttattaattagtacccctctagtgttctggaggggatattcatattttttaagagtgactatttatgaaaacttgcataacaaagggaattgtgaccgtaagtttaacggcaatattactcagctgctcatccgcatgggcggcaggtaaaggcgggattggacttgcagcaacacgtcttgtttattcagaaggtgaagagcaaatttcactgggtgtacgtaacaccagtccggatgttccttatcttattcagtcatgggtgatgaccccagataataaaaatcagcagattttattattacaccaccgctatttgtgctgaatccggctaatgagaatctgttacgcattatgtacattggtgcgccgttggcgaaagacagagaaacccttttcttcactagcgtacgggcagtcccttcaacaacgaagcgggaagagggaaataccctgaagattgccacacaaagcgtcatcaaacttttctggcgaccaaaaggtttagcgtatcccttaggcgaggctccggcgaaactgcgttgcacttcgtcagctgacatggttacggtcagtaacccaacaccttatttcattaccctgacagacctgaaaataggtggaaaagtagttaaaaatcaaatgatttccccctttgataaataccaattttctctgccaaagggggccaaaatagcagcgtaacgtatcgaaccatcaatgactacggggcggaaacgccgcaactcaactgtaaatcgtaagccgtcttcagttaagagagcgagatgtatagaactcatcgacaacacagcctgttaagctctggtggagtgccatcgtttattggtgggctggtggtgtttgtgtcggcagcgttcaatgcacaagctgaaacctggttcgatcctgcttttttcaaagatgatccctcaatggtggccgatttgtctcgtttcgaaaaaggacaaaaaataacgccaggggtttatcgtgtcgatattgttctgaatcagacaattgtagatacgcgcaacgtcaattttgttgagataacgccagagaaggggattgccgcctgtttgacgactgaaagcctggatgcaatgggtgttaatactgatgcgtttccggcttttaaacaactggacaaacaagcgtgtgtgccattggcggagattattccggatgccagcgtaacgtttaatgtgaataaactccgtctggaaatttcagtaccgcaaatcgccatcaaaagtaatgcccgtggttatgtcccccctgaacgttgggatgaagggatcaacgcgctattactgggatattcgtttagcggggctaatagtattcatagcagcgcagacagtgattctggcgacagctattttctgaatttaaacagtggcgttaatttaggcccatggagattgcgcaacaattcaacatggagtcgcagtagtggaccaaaccgcagaatggaagaatctcagcagctatttgcagcgggcggttattccactaaaaggcgaactgaccgtaggtgatgattatactgcaggcgattttttcgatagtgtcagctttcgtggtgtgcagctggcgtcagatgacaacatgctgccagacagcctgaaagggtttgcgcctgtggtgcgtggtatcgccaaaagcaatgcccagataacgattaagcaaaatggttacaccatttaccaaacttatgtatcgcctggtgcttttgaaattagtgatctctattccacgtcgtcgagcggtgatttgttagttgaaatcaaagaagcggacggcagcgtcaatagctacagcgtaccgttttccagcgtgccattactccagcgtcaggggcgaatcaaatacgcggtgacactggcgaaatacagaaccaatagtaatgaacagcaggagagcaaatttgcccaggccacgttgcagtggggcggaccgtggggaacgacatggtatggtggtggacaatatgctgaatattaccgtgccgccatgtttggtctgggatttaaccttggcgatttcggagcaatttcgttcgatgcgacccaggcgaagagtacgctggcagaccaaagcgaacataaaggtcagtcatatcgttttctgtatgccaaaacgctcaaccaattgggcactaattttcaattgatgggctatcgctattcgacgtcgggtttctacaccctttccgacaccatgtataaacatatggatggctacgaatttaatgacggtgatgatgaagatacgccgatgtggtcgcgttattacaatttgttttacaccaaacgtggcaaactgcaggtcaatatctcccagcaattaggcgagtacggttcgttttatttaagtggtagccagcaaacttactggcataccgatcaacaggatcggctattacagtttggctacaacacgcaaattaaagatctctcgctgggggtttcctggaactacagtaagtcccgtggtcaacctgatgctgatcaggtgtttgcactaaatttttccctgccgctcaatctgttgctccccagaagtaatgatagctataccaggaaaaaaattacgcctggatgacctctaacaccagtatcgataacgaagggcacattacacaaaacctgggtttaacggagacactactcgatgacggtaacctgagctacagcgtgcaacagggatataacagcgaggggaaaacggctaatggtagcgccagcatggactacaaaggggcgtttgcagatgcccgagtgggctacaactacagcgataacggcagtcaacaacaactgaactacgctctttcaggcagtttagttgcccattcacagggcattaccctggggcaatcgctgggggaaactaacgtgctgattgcagcaccaggcgcagagaatactcgtgtggcgaacagcaccgggctgaaaactgactggcgcggatataccgttgtcccctatgccacttcttatcgggaaaatcgaatagcacttgatgcggcatcgttaaaacgtaacgtggatcttgaaaatgcagtagtcaacgtggttcccaccaaaggggcgttggttctggcggagttcaatgcccatgcgggagcaagggtattaatgaaaacatcaaagcagggtataccgctgcgttttggcgcgatagcgacgctggacggcatacagactaatagcggcattattgatgatgatggctcgctctatatgtccggtttgcccgctcagggagcgataactgtacgctggggcgaagctcccgatcaaatttgtcatatcagttaccagcttaccgaacaacaaattaactctgcgattacgcgaatggatgccatatgcagataatctttggagaaaaatgcgtgttattactacgactattttttgccgccgtcttaatgctatggtgcgctcaaactgctgcttatagcgggcagtgtcataccactcaggggaatccgtatattggcgtcaattttggcgttaaaaccctggaggaagaagaaaatacggctggagtagttaaagacaaattttatcagtggaacgaatcgaatgattattatgtttcctgtgattgcgataaagacaatgtcagaagtggccgatgggcattcgccgcggattcaccgttagtctatttaggcgacaactggtacaaaattaatgactatcttgccgccaaagttttattgcaggttaaaggcagttctcctactgcggttcctttcgaaaacgtgggcacaggggcagatacacgatggcatatttgcgatcccggcggtcaacgtttaggtggccagggggctagcggtaatagcggtagcttttccctgaaaatattgcagccgttcgttggttcggtcgtcattcctcctatggcgctggcgcgattatttgaatgctacaacatacccgcaggtgattcctgcacgactacaggtacaccggttttagtgtattacctgtctggtacgatcaattcacttggctcatgttccgtcaatgccggagagactatcgaggtcgatctgggcgacgtatttgcggctaactttcgtgttgtagggcataaaccccttggggccagaacggcagaactcgcaattccagtcaggtgtaacacgggaaacgaagggttagttaacgtcaacctgagtctgacggcaacctcagaccccagctatccccaggcgattaagacgtcacgtcctggcgtgggcgtggtggtgaccgatagccagaacaacattatttcccctgctggtgggacactaccgctctctattcctgatgatgcagacagtatcgcgcgaatgaatgtctatccagtcagcacgacaggcgtaccaccagaaaccgggcgatttgaagccacggcaacggtgagaataaattttgattaacgcgtgaacgtatgaagaaaaaaacgatatttcagtgcgttatcttgttctttagcattcttaacatccatgtcgggatggctgggcctgaacaagttagtatgcatatttatgggaatgtggtcgatcagggctgtgatgtcgccaccaaaagtgcattacaaaatattcatattggtgattttaatatcagtgattttcaggccgcgaataccgtaagcactgctgctgatttgaatatcgatatcaccggttgtgccgctggtattactggcgcggacgtcctttttagcggcgaggctgacacccttgcgccgacactgctcaaactaactgacacaggcggaagcggtggtatggcaacggggattgccgtgcaaattcttgatgcgcaaagtcagcaagaaatcccgctcaatcaggtccagcctcttacgcccttaaaagccggggataacacactcaaatatcaacttcgttataagtccacaaaggcgggagcaacgggcggtaatgcgacggcggttctctattttgatctggtttaccagtgaaggagtgatgttgaaacggataatctggattctgttcttactgggattaacggggggctgtgagctatttgcccatgatggcacagtcaacattagcggatcgtttcgccgtaatacatgcgtgctggcacaggatagcaagcaaatcaatgtgcagttaggcgatgtctcgctgacacgtttttttcatgggaattatggcccggagaaatctttcatcattaatttgcaggattgcggaacagatgtcagcacggttgacgtcaccttttcaggaacccccgacggagtgcagagcgaaatgctgtccattgaaagtggtacggatgcagccagcgggctggcaattgcgattctggatgatgcgaagatattgattccgcttaaccaggcgagtaaagactacagcctacatagcggtaaggtgccattaactttttatgcgcaattgcgacctgtcaatagcgatgtgcagtcgggtaaagtgaatgccagcgcgacatttgtacttcattatgactaatacgtggaacagattggcgctcttgattttcgccgttttatcgctgctggtggcgggtgaattgcgggcaggagtggtggtcggcggaacgcgatttatctttccggcagacagagaatcgatatctattttactgactaataccagtcaggaatcctggcttattaacagtaaaatcaaccgcccaacgcgttggccgggggggaagcgtcgacagtgccagcaccattactggccgctccgccacttattctcctgaagcccggtactacaggcacgttgcgcttgctgagaacggaaagcgacatcttgcctgtggatcgcgaaacgctatttgagttaagcattgccagcgtgccatccggcaaagttgaaaatcagagcgtaaaagtggcgatgcgctcggtatttaaactgttctggcgacccgaaggtttgccgggcgaccctctggaagcttatcaacaattacgctggacacggaattcgcagggtgtacaactcactaacccaacgccttactacattaacctgattcagttgagcgtaaatggtaaagcgttaagtaatgcgggagttgtgccgcctaaaagccagcgtcagacaagctggtgtcaggcaatcgcaccgtgtcatgtcgcctggcgggcgataaatgattacggcgggttgagtgcaaagaaggagcaaaatctgccctgaaacaggttcggaaaacgtttgcgttttttttgccgcaggtcaattcccttttggtccgaactcgcacataatacgcccccggtttgcacaccgggaatccaggagagttcatgtactaccccttcgttcgtaaagcccttttccagctcgatccagagcgcgctcatgagtttacttttcagcaattacgccgtattacaggaacgccgtttgaagcactggtgcggcagaaagtgcctgcgaaacctgttaactgcatgggcctgacgtttaaaaatccgcttggtctggcagccggtcttgataaagacggggagtgcattgacgcgttaggcgcgatgggatttggatcgatcgagatcggtaccgtcacgccacgtccacagccaggtaatgacaagccgcgtctctttcgtctggtagatgccgaaggtttgatcaaccgtatgggctttaataatcttggcgttgataacctcgtagagaacgtaaaaaaggcccattatgacggcgtcctgggtattaacatcggcaaaaataaagatacgccagtggagcagggcaaagatgactatctgatttgtatggaaaaaatctatgcctatgcgggatatatcgccatcaatatttcatcgccgaataccccaggattacgcacactgcaatatggtgaagcgctggatgatctcttaaccgcgattaaaaataagcaaaatgatttgcaagcgatgcaccataaatatgtgccgatcgcagtgaagatcgcgccggatctttctgaagaagaattgatccaggttgccgatagtttagttcgccataatattgatggcgttattgcaaccaataccacactcgatcgttctcttgttcagggaatgaaaaattgcgatcaaaccggtggcttaagtggtcgtccgcttcagttaaaaagcaccgaaattattcgccgcttgtcactggaattaaacggtcgcttaccgatcatcggtgttggcggcatcgactcggttatcgctgcgcgtgaaaagattgctgcgggtgcctcactggtgcaaatttattctggttttatttttaaaggtccgccgctgattaaagaaatcgttacccatatctaattatttcttcgaattcctctttataagataatcagggctttattttcagccctggttgttttatattcattgctgttgcttatttagacattttgtacttttattgttgaggttattaagcgaagcgacaatggattgtgttgctgcggttttatagggtaggggagaggcagatgcgaattaaaccagacgataactggcgttggtattacgatgaagagcacgatcgaatgatgctcgatttagccaatggtatgctatttcgctcacgttttgcgcgcaagatgttgactccagatgccttttctcccgcaggcttttgcgttgacgacgccgcgctctatttctcttttgaagaaaagtgccgcgattttaatttatctaaagaacaaaaagccgaactggtgctgaatgcactggtagcaattcgctatctcaaaccgcaaatgccgaaaagctggcattttgtttcccatggtgaaatgtgggtgcccatgccgggcgatgcggcctgcgtttggttgagcgatactcacgagcaggtcaatttgctggtcgttgaatctggcgaaaatgccgcactatgcctgctggcacaaccctgcgttgttattgcgggtcgcgcgatgcagttgggcgacgccattaaaatcatgaacgacaggctgaaaccgcaggttaatgttgacagcttcagcctcgaacaggctgtctaacgcgccaacttaagtgcagtcttcggtacacagctacagcaaagaatggtgccatcatcgcccattgctgattttttcagcggcgtgacttcgccttctaaaagctgaacacggcaacttccacaaatgcccgcgcggcaagaataagggatacgaattccctgattttctaattgctccagcaacacctgttggttatttccacgaaatgcctgtccctgccagtcaatatctacatttgcgtccggttgttgcgtgatgttggcggtatcatcagcggcagctgcgccgtaaatttttgccggagccgttgccagaatttccacctcatcgccaacgcgaatcacgccgctattacgggcaattaaattctgaccaaaatcgacatcgccgttatcctgggcagtgcggaaagattgcaatgtttttaatggttcgcctgccggatgtttttgccctttttctgggctgacggtggtgaaaatacagcggctacaaggtttaaccacatcaaacaccacatcaccaatgcgaatcactttccagcgatcttcttcccaggctgacgcgccggaaaccaccagattggggcggaattgctccatttttacactggccggacaacgttgttggagatcacgtaacgaggcttcgttagcaagaaggtaaggatagccatcagcaaatgacagaggtacagtgttgtggcgtttcacgcgccgggtcatttgtggccccacccagcgtaattgcacttcgcgggagaaaaatccacttagccatttgttgatcgcgtctggcgcaattcgcgcggtaaaatgtgtgccccaaacttcggttggtgcgtcttgtgtggcgaaatcagcaaaacgaacatatgcgctactgccatctggtgcggtgagatgcaagccatcatgcacaggtgaaggagtaaaccgtaccatctggggaaactggcgagcggtaataaacgtaccgtcaggttccgtgatcataaagatgcgatcgaaggccagaccactgacatcagccagagcatgtgtaagaccaatgccgcgcatcgatttaacaggatgaataaaaagccgggttaatgtcaccacggtgcggtcctcaaatgaaaataagccctcaactttatgacatgacgcgcttattagctataatgcgcaacaattttcttagcgcctgtcccattaggctattttatttgtcagtttggccctgggttgtgctcgaaatcctcacgtacttgtgtacgctccggtttctccgcgctgtccatgtccagactgactgcaacaattacgcctactgcggtaggctcttagagtaaaagtgacgatatgaattctctgtttgccagtacggcccgtgggctggaagagctgttaaaaactgaactggaaaacctgggggccgttgaatgccaggtggttcagggtggggtccatttcaagggcgacacacggcttgtttaccagagcctgatgtggagccgcctggcctcgcgtattatgttgccgctgggcgagtgtaaggtttacagcgatttagacctctatctcggtgttcaggcgatcaactggacagagatgtttaatcctggcgcgaccttcgctgtccacttcagtggtttgaatgacaccatccgcaacagtcagtacggcgcgatgaaagtgaaagacgcgatcgtcgatgctttcacgcggaaaaatctgccgcgtccaaatgttgatcgcgatgcgccggatatccgcgttaacgtctggctgcataaagaaaccgccagtatcgctcttgatctgagtggtgatggtttacatctgcgtggctatcgcgatcgtgctggtattgcgccgatcaaagaaaccctggcagccgctattgtgatgcgatccggctggcagccaggaacaccgctgctcgatccgatgtgtggttccggtacgttgctgattgaagcggcgatgctggcgaccgatcgcgcaccaggcttgcaccgtgggcgttggggctttagcggctgggcgcagcatgatgaagctatctggcaggaagtgaaagcggaagcgcaaactcgcgcccgtaaaggcctggctgagtatagctctcatttttacggttcggacagcgacgcacgggtgattcaacgtgcacgcactaacgcccgtcttgcggggattggtgaactgatcacctttgaggtgaaagatgtcgcgcaactgaccaatccgctgccgaaagggccgtacggcacagtgttgagcaacccgccatacggggaacgtctggacagcgaaccggcgctgattgcgctgcatagcctgctgggtcggatcatgaaaaaccagtttggtggctggaatctctctttgtttagtgcctcgccggatctgctaagctgcttgcagctgcgtgcagacaaacagtacaaggcgaaaaacggcccgctggactgcgtacagaaaaattaccacgttgccgaaagcactccagacagcaaaccggcgatggtagcggaagactacgccaaccgcctgcgtaagaacctcaaaaaattcgagaagtgggctcgccaggaaggaattgaatgttaccgcctgtatgacgccgatctaccggaatataacgttgccgttgaccgttatgccgactgggtggtggtgcaggagtatgcgccgccaaaaactattgatgctcacaaagcgcgtcagcgtctgttcgatattatcgctgcaaccatttcggtactggggattgcgccaaacaaactggtgctgaaaacccgtgaacgccagaagggcaaaaatcagtaccagaaactgggcgagaagggcgagtttcttgaagttaccgaatataacgctcacttgttggtgaacctgacggattacctcgataccggtctgtttctcgatcaccgtatcgcccgtcgtatgctcggtcagatgagcaaaggcaaagatttcctcaacctgttctcttataccggcagcgccaccgtgcatgcgggattaggcggtgcacgcagcaccaccaccgtggatatgtcgcgtacttatctggagtgggcagaacgcaacctgcgtttgaatggcctgaccgggcgtgcgcatcgcctgattcaggccgattgcctggcgtggctgcgtgaggcaaatgaacagttcgatctgatctttatcgatccgccaaccttctctaactcaaaacgaatggaagatgcgtttgatgttcagcgcgatcatctggcgctgatgaaagatttgaaacgtctgctgcgtgcaggtgggacgattatgttctcgaacaataaacgtggcttccgtatggatctcgacggcctagcaaaactgggactgaaagcacaagaaattacgcaaaaaacgctctcccaggatttcgcccgtaaccgccagatccacaactgctggctgattaccgcagcctaaaggaatagtaatgtcattaatcagtatgcatggcgcatggctgtcgttcagcgacgcgccgcttctcgataacgcagaactgcatatcgaagataacgaacgtgtttgtctggtgggccgcaacggcgcgggcaaatcgacgttaatgaaaatcctcaaccgtgaacaagggctggatgacggtcgcattatttacgagcaagatttgattgtagctcgtctgcaacaggatccgccgcgtaacgttgagggtagcgtttatgatttcgttgccgaaggcattgaagaacaagcggaatatctgaaacgctatcacgatatttcgcgcctggtgatgaacgacccgagcgagaaaaatctcaacgaactggcgaaggttcaggaacagctggatcaccacaacctgtggcagctggaaaaccgcatcaacgaagtgctggcgcaactggggttagatcctaacgttgcgctgtcgtcgctttccggcggctggttgcgtaaagcggcattaggacgcgcgctggtgagtaatccgcgcgtgctgttgcttgatgaaccgacaaaccacctggatattgaaaccatcgactggctggaagggtttttgaaaactttcaacgggacgattattttcatctcccacgaccgttcgtttatccgcaatatggcgacgcgcattgttgatctcgatcgcggcaagctggtgacctatccagggaattacgaccagtacctgctggaaaaagaagaagccctgcgcgtggaagaattacaaaatgccgagttcgatcgcaaattggcgcaggaagaggtgtggatccgccaggggatcaaagcacgccgtacccgtaatgaaggccgcgtacgcgccctgaaagcgatgcgtcgcgagcgtggtgaacgtcgcgaagtgatgggtaccgcaaagatgcaggtggaagaggccagccgctccggtaagatcgttttcgaaatggaagacgtttgctaccaggttgacggtaagcaactggtgaaagatttttcggcccaggttctacgtggcgacaaaattgccctgattggtccgaatgggtgcggcaaaaccacgctgctgaaactgatgctcggtcagcttcaagcggacagcgggcgtattcacgttggcaccaaactggaagtggcttatttcgatcagcaccgcgcggaactggatcccgataaaacggtgatggataaccttgccgaaggtaagcaagaggtgatggttaacggcaagccacgccacgtattgggctatttgcaggactttctgttccatccgaaacgggcgatgacgccggtacgtgcgctttctggcggtgagcggaaccgcttgctgctggcgcgtttgttcctcaaaccaagcaacttattgattcttgacgaaccgaccaacgatcttgatgtcgaaacgctggaactgctggaagaactgatcgacagctatcagggcacggtattgctggttagccacgatcgtcagtttgtcgataacaccgttacagaatgttggatcttcgaaggcggcggtaaaattggtcgttatgtcggcggttatcatgatgcccgtggtcagcaagagcagtatgtggcgctcaaacagcctgcggtgaaaaaaaccgaagaagccgccgcggcaaaagcagaaactgtaaaacgcagcagtagcaaactaagctataaattgcagcgcgaactggagcagctaccgcaattgctcgaagatctggaggcgaagctggaagccctacagacgcaggtggcggatgcttccttcttcagtcagccacatgagcagacacaaaaagtgctcgccgatatggctgctgcagagcaggagctggagcaagcctttgaacgctgggagtatcttgaagcgttaaaaaatggtggctgatcgcaaaatagtcgatttaaacagagacagctgacaacggtaaaattgcctgatgaactgggtttatcaggcatgaaaaccaacactttgttagtcatctgtaaaatagcgcatcattaaggagtaccaatgtgcgaacatcatcatgccgcgaagcacatcctgtgctcgcagtgtgacatgctggtggcgttaccgcgccttgagcatggtcagaaagcggcatgtccccggtgtggcacaacgttaaccgtggcgtgggatgcccctcggcagcgtcccaccgcctatgcgttggctgcactgttcatgctgttgctgtccaacttgtttccttttgtgaatatgaacgttgcaggagttaccagtgaaattacattactggaaattcccggcgtgcttttttctgaggactacgccagcctcggcacctttttcctgttgtttgtgcaactggttcccgcgttttgtctgataaccattctgttactggtgaatcgcgcggaattaccggtccgtttaaaagagcaactggcacgggtgctttttcaactcaaaacctggggaatggcggagattttcctcgctggtgtgctggtcagtttcgttaaactgatggcttacggcagcattggggtaggcagcagctttctcccctggtgtttattttgtgtcctgcaactgcgcgcttttcagtgcgttgatcgtcgctggttatgggacgacatcgccccgatgccagaactgcgccagccgctaaaaccaggcgtcacggggatacgtcaggggctgcgttcgtgctcctgttgtacggcaatccttcctgctgatgaacccgtgtgcccgcgttgtagtaccaaagggtacgttcggcgtagaaacagcctgcagtggacactcgcgctgcttgtaacgtccatcatgctgtatcttccggctaatattttgcccatcatggtgacggatttattaggctcgaagatgccgtcgacgattctcgctggggtcattctgttatggagcgaaggctcttatcccgtcgctgcggtgatctttctggccagtattatggtgccaacgttaaagatgatcgccatcgcgtggctgtgttgggatgccaaagggcatggcaagcgcgacagtgaaagaatgcatttgatttatgaagttgttgagtttgtaggccgctggtcgatgattgacgttttcgttatcgcggtgctctcggcgctggtgcgtatgggaggtttaatgagtatttatccggcaatgggtgcattaatgtttgctttagtcgtcataatgacaatgttttctgctatgacgtttgacccgcgtttgtcgtgggatcgtcaacctgaatcagagcatgaggagtcctgacagtatggaatctaataatggggaagccaaaatccagaaagtgaagaactggtctcccgtgtggatatttcctatcgtcacggcgctcattggggcctgggttcttttttatcattacagccatcagggaccggaagtgaccctgatcaccgcgaatgcggaaggaattgaaggtggcaaaaccaccattaaaagccgtagcgttgacgtcggcgtggttgaaagcgccacactggctgatgatttgacgcacgttgaaatcaaagcgcggctgaattccggtatggaaaaattgctgcataaagacaccgtcttttgggtggtgaaaccgcagattggtcgcgaagggattagcggcctgggaacgctgctgtctggagtttatatcgaactgcagccaggcgcgaaaggcagcaaaatggataaatacgatttgctggactcgccaccgttggccccgcctgatgcgaaaggtatccgtgtgattctcgatagcaaaaaagccgggcagctctcgccaggagatccggtgctgttccgtggctatcgggtaggttcggttgaaaccagcaccttcgatacacaaaaacgcaatatcagctatcaactgttcatcaatgcaccttatgaccgactggtgaccaacaatgttcgcttctggaaagatagtggcattgcggttgatctgacgtcagcagggatgcgtgtggagatgggctcattgacaacgctgctgagtggcggtgtcagctttgatgtgccggaaggtctggatttagggcagccagtggcaccgaaaacagctttcgttttgtatgatgatcagaagagcattcaggattcgttgtacaccgatcacattgattatctgatgttctttaaagattcggtacgcggtctgcaaccgggagctccggtagagttccggggtattcgcctgggtaccgtaagcaaagtgccattctttgcgccgaatatgcgtcagacatttaacgatgattaccgtattccggtactgattcgtatcgagccagagcggctgaaaatgcagcttggcgaaaatgcggatgttgttgagcaccttggcgaattgttgaaacgtggtttacgcggatcgctgaaaaccggaaacctggtcactggtgcactgtatgttgatctcgatttctatccaaatacgcctgcaataaccggtattcgtgaatttaatggttatcagattatcccgaccgttagcggcggcctggcgcaaatccagcaacgactgatggaagcgttggataagatcaacaaactgccattgaatccgatgattgaacaggcaaccagtacgctttctgaaagtcagcgcacaatgaaaaacctgcaaacgacgctggatagcatgaacaagatcctcgctagccagtcgatgcagcagttgccgacggatatgcagtcaacgttgcgtgaattgaatcgcagcatgcagggcttccagcctggctccgcagcctacaacaagatggtggcggatatgcagcgccttgatcaggtgttgcgagaactgcaaccggtgctgaaaacgctcaatgagaagagtaacgcgctggtatttgaagcgaaggacaaaaaagatccagagccgaagagggcgaaacaatgaaaaagtggctagtgacgattgcagcactgtggctggccggatgcagctccggcgaaattaataaaaactattaccagttacctgtggtgcagagcggtacacaaagtaccgccagccagggcaatcgtctgttatgggtagagcaggtcactgttcctgactatctggcggggaatggtgtggtttatcaaaccagtgatgtgaagtatgtgattgccaacaacaacttgtgggccagcccgttggatcaacagttgcgcaacaccctggttgccaacctgagtacgcaactgcccggctgggtggttgcctcccagcctctgggaagcgcccaggacacgctcaatgttaccgtaacggagtttaacggtcgctatgatggcaaggtcattgtcagtggtgagtggctgttgaaccaccagggacaactgatcaaacgtccgttccgtctggaaggagtgcaaactcaggatggttacgatgagatggttaaagtactggccagtgtctggagtcaggaagccgcttctattgcgcaagagataaagcgtctaccttaattataaagatttgtaaatataaccgtctccggtatgttgcctgaggcggtttttttgtttctaacgtgcggaaaaatttgttcctcttcacattttttgtacaaccgacatgcccgtgtagctcacaaatatgacagtggcgtgaattttgcgcattgacggcagttatgattcgcggtattgcttaactgtgattgcacatttagtaatcactgttttcttttccaccagaaaccagtatgagggaaacgaggcatgaagagacaaaaacgagatcgcctggaacgggcacatcaacgtggttatcaggccggcatcgccggacgctcaaaagaaatgtgtccctatcagacgctgaatcaaaggtcacaatggctgggaggctggcgagaagccatggcggacagggtagtaatggcctgattctgtctctttaaaaagaaacctccgcattgcggaggtttcgccttttgatactctgtctgattataatcagaaggcagacgtatcctggaacagaccgactttcaggtcgctggcggtatagataagacgaccatcaaccagcacttcgccatccgccaggcccataatcagacgacggttaacaatgcgtttaaagtgaatacggtaggtcacttttttcgctgtcggcagtacctgaccagtgaatttcacttcgccaacgcccagcgcgcggcctttaccttcgctgcccagccagccgaggtagaaccctaccagctgccacattgcgtccaggcccaggcatcccggcataaccggatcgccaataaagtggcatccgaagaaccacagatccggattgatatccagttctgcttcaacataccctttgtcgaagttaccacccgtttcggtcattttgaccacacggtccatcatcagcatgttcggtgctggcaattgcgggcctttagcgccaaacagttcaccgcgaccagaggcaagaaggtcttcttttgtataggattcgcgtttatctaccatgttctctgtaagccttattttattgaagcacgcaggatagctaacacgtgtacgctgaacaagtccgatcagttcggaataaaccagttcagccaacgtaatggccatggaaaacggtgacgtccttcctgttgcgatgcttgcgcgatacgttcctggatggtttgcatcagcgtcgtttggccttcgccatcccacaccagatttaataataacggcagtgcgtcagtcacatcgtctactgcccagatggtgaatttgccttcttctaccgctttcaccagttcactgtgaagacttaaatggcgaacgttagctgtggggataatgacaccttgtttcccggttaactcacgttgctggcaaatagcaaagaagccttcgattttctcatttaaaccaccgaccggctgggcgcgaccgaactgatcgactgaacctgtgatagcgatactctgattcaccggcacatcggcgagggcgcttatcagggcgcagagttcagccatcgaggcactatctccatcaacttcactgtatgactgctcaaatgtcagcgatgctgagaaggggatctgttgctcaagctgtagttccgacatcaggaacgcttgcatgatcatcatccctttcgcatggatattgccgccaagctccgctttgcgttcgatgtcggtgaattcaccatcgccaatatgcacaacgcagctaatgcgagaaggttcgccaaaagcgcgtggatgacccggaaattcaatgaccgaaagggcgttaatttgcccgatgcgttcgccttcggtttcaatcaggatttgctcctgaaggatctcatcctgcatacgttcagcgaggaaaccttcgcgccattcacgctgctgcagcattaagtttagctgctcgccggagaaggtgtcgccatcacacagggaggcgacctctttacactggcggaggatccactgcgggctaagcggaagtgtttcttgttcaccggtgtagcgtgctgcttcgcggataagtaccggccaggcatccgctcccggtgcaggtaagtgattatgtctggcggtaaatgtcacccagcgacaccactgggttactgactctgcatcgacaatctgcagagtatcttcaaattcgctataaatagcctgctctgaaagctctggctccatctcctggaaatcagccaatgattcgcgttcgcctaccagaatgactttcagcttcaatggcatcgaaggcacagagacggggagagggcgcgactcatcaaacgcaacccagtcaaaacgctcgcggttaacgatatttttcagccgcatccacagcagaggttgcgccagcagtgtacgcaaagagatgatgagaataccgccatttgcctgatgcaccagaccaggctgcagggtaatgtcgccattaaactggcgcaggcagccaaagagttgctccgcttctacccagtcggcagcgacaacttgcgttaaagtcgcaaaattatcatctgcactcactgcgtgacgtaagcggatggagtggccggaaacctcatagtgaccgcccaccagttggcctgcatcgctttgtagcgtacgcgcggcattggcaataagattcagatactcagactcttccggggccttcgccagcataaaagaggaggatgctcgcgtatgcagcaactgctccagtgcgaattgcagtcgcggttgagtatcactgaataaaggatcgttttcgtcaatcaaatgtggctgagcaaatatttcctgatagctatcggtatcaggaaccaggtcacgccatgcaagtttcgtaatggtcaaagttgatgttttttagtctgttgtcaaagccgcgattataccgtaaccggcactacagcacacgtagaaagcaccgacaatactcctggcatgggcgttaaagctcacaggatggagattcttttcttcactggcctaaaaagctgatattctgtaaagagttacacggtaacattgagatcgctatgaaatatcaacaacttgaaaatcttgaaagcggttggaaatggaagtatctggtgaagaagcatcgcgaaggggagttaatcacccgttacatagaagccagtgccgcccaggaagccgtcgatgtgttgctctcgctcgaaaatgaacccgtgctggtaaatggctggattgacaagcatatgaatccggaactggtcaatcgcatgaagcaaaccattcgggcaagacgaaagcgccattttaatgcggaacaccagcatacgcgcaaaaaatcgatcgatctggaatttattgtctggcaacgtctggctggtcttgcgcagcgtcgcggtaaaacgctttctgaaacgattgttcagctgattgaagatgcggaaaacaaagagaaatacgcgaataaaatgtcttctctgaagcaggatctgcaggcattgctgggtaaggaataactgacgaaagtcagttcaatttactaaaggcaaaaaaaccccgcagcagcggggtttttctaccagacgagaacttaagcttgcggctgagttacaacgtctttgatacctttaacttcgatctctacgcgacgatccggagccaggcagtcgatcagtgcagcacgctgtttcacgttgtcacaggtgttgccagtaaccgggttggattcgcccataccacgtgcggagatcttgtctgccgggatacctttggagatcaggtaatcaacaacagactgagcacggcgctcggacagaccctggttgtaagcgtcagaaccgatgcggtcggtgtaacccagaacaactacggaaccgtctttcggatccaggttgctcagctggctgtacagctgatccagagcagcctgaccttccggtttcagggttgctttgttgaagttgaacagaacgtcagacttcagagtgaagtgcttggtctgtacttccggtgccggagctggagccggagcaactactggagctgcttcgccctgaccgaaacggtaggaaacacccaggctcagcatgccgttgtccggacgagtgccgatggtgtgtgcgtcaccgatgttgttggtccactggtattccagacgggtagcgatttcaggagtgatcgcgtactcaacaccgccagcgaagaccggagaaacgccggtgtcgtggtttttaccataaacgttggatttagtgtctgcacgccataccataccacccagacgagtgtagatgtccaggtcgtcagtgattgggtaacccagtttagcggtcagttgaacgccctgagctttgtatgcaccgttttcaacgctgcctttgtacggcatacgacctaaccagtcgtaacccatttcaaagccaacatacgggttaacctggtaaccaccaaaagcaccagcgcccagttggttttcatgggtcgggccattgttgttgatgaaaccagtgtcatggtactgggaccagcccagtttagcaccagtgtaccaggtgttatctttcggagcggcctgcgctacggtagcgaaaccagccagtgccactgcaatcgcgatagctgtctttttcattttttgcgcctcgttatcatccaaaatacgccatgaatatctccaacgagataacacggttaaatccttcaccgggggatctgctcaatattaactctaccgatatcttcggcttatgccgagcacccctggcgatgtaaagtctacaacgtagttgaaaacttacaagtgtgaactccgtcaggcatatgaaaaaaaagtcttgtataaggtatgtttaatcttttttgtcagcgacaatttacagaagagaatcgcggaaaccgcttcagacaagcctccgcaaggaaaattagtcacgactgaaagcattggctgggcgacaaaaaaagttccaggattaatcctaaatttacttaatgatacaaattagagtgaatttttagcccggaaagttgtctcgtggcgtgagaggatgcgcttaccggacgcataataaaccccatagcgttaccttcatttgccgcatcaacaagttcagcatgctcttcttcagtcaaatcatctgccaaccaaccgatcaccacactgtaattgcccgtgcgtaaagcgcgaaccattgactccacagtgtggcaaggggagagctggctaatctgcattactttcgttaagggtagcccagatgcctgaacccattcccgactcagtttttgttgcggtgttaaccagagttgccagcgcgattgctgaccgagttgctgtaacaatggcaacagtagaagttgcgtcatcatgggctgatcttcgcgatagacaacttcactgataagcccggctgtagtgttttccgtagagacacgcgcaattttacttgctgcggatgagaacgacgaagaacgatgtgcatagcctgaagtgtacataatcaatccagcccctgtgagttactgtatggatgtacagtacatccagtgacaacaaagatcaaccctattttcggaaagagcctcgcaaattttgtcgttggtgacgggaaaacataaattaatcttgccccttaagaataagttgcctattttcgtagttaacggatccgttaatgtgaatcattcttttatgttatgattttaaaaggaattttatgaaaagcctctcctataagcggatctataaatcacaagaatacctggcaacgttgggcacaattgaataccgatcattgtttggcagttacagcctgaccgttgacgacacggtgtttgcgatggtttctgatggtgagttgtatcttcgggcttgtgagcaaagtgcacagtactgtgtaaaacatccgcctgtctggctgacatataaaaagtgtggccgatccgttaccctcaattactatcgggttgatgaaagtctatggcgaaatcaactgaagctggtgcgtctgtcgaaatattctctcgatgcagcgctgaaagagaaaagcacgcgcaatacccgggaaagactgaaagatttgcccaatatgtcttttcatctggaagcgattctcggggaggtggggattaaggatgtacgggcgttacgtatacttggggcaaaaatgtgttggttgcgactgcggcagcaaaacagtctggtgacagaaaagattctgtttatgcttgaaggtgccattatcggcattcatgaagctgcgctcccggtggcacgccgccaggagcttgcagaatgggctgactctcttacgccgaaacaggagtttcctgcggaacttgagtaatctggcgttgcagacgaccaatctcaggcagtaatgcaatcaataatccaacttgttgtacgaccagaggttctttgctgtctgcccgtggttcaagttgctgcatccgctgtttcaggctagctaatgcctcattgacgcgttcttcatcagcaggttgatgatgtaacgcgtcatcaacatagcaaactgcgtcatcaagaaacgccagaatttcaggattagttaactgctcccggtgagcaccgagggctgagatatagctggtaaacgtatggttaaggcacagcaaccgaaacgcggcttcgcgaatttgcggggtaacgttcggttcgctggacatatttgataccaccgacgccagttcagcatcacggttgtgtgcatcgcggcgggcaatacgatacgccagacggttatcacgcccctgatggtattgctccagtatggcatcgagataccggcagttggcctctgtggcgcgttcgagcattcgcggcagattgcgaaactgccagtcaggccagatgtagctcactgccgcccacgcaatggcacaaccaatcagcgtatcgattacgcgaggtaacgctacttcaaaaccttcacccagcaagttaaaacacagtagcaccaaaagtgtgatgaacatcgttgcatgggcatattgcacgttacggaaggcaaaaaagagcacgccggtaataaccagtagcaccagctgcccttccagtgacggtacaaaccacagcacaggaatgccaatggcgataccgaccagcgtaccaataatccttaacttcaggcggtggcgcgtggcgttatagtttggctggcagacaaacaaacttgtcagcaagatccaatacccgtgatgcattccggttatttgaatgatggcgtagccgaagcacaacaccagcgacattcttaccgcatgacggaagagggcggattccggcgtgaagtgacggctaagacgcagccagatatcactcaacccgtgcgggctgtcatcagcgagctcattttcgtcattattatggggtagtgcctgggcctgttctgattcaattgttgccagttgggcatcaatggcgcgtaaattgttcagcaaaaatcccagtgttttgagtaaatcggcgggtgcgccgttatcgcgcatccgctccagcgcagcatcaatatgcgtaaaagcgcgctcaaaatgcggatcatgttgataaggctgacgcagcaaaatacagcgtgacagttgctggcacgcctggccctgcatcgacatcagccgctgaaaacggaacagcacgtcgctgtggcgaaaatgttcacgcaatgtttgatactgaatatgagaagagctggcacgctcgtgaatatcctgtgcgacaaagtaataatgcagcgtgcgacgcgttccccgttgaccacgatcgccacgtaagcgggtcagcagcgagagtttcgtctgattcaatgtcgccatcagctgaccgttggcgagagccaaatcgtacagcggtgcctggctttcatcttcaatatcaggatcaaacatgcgcgacttgagctcaagataacgcgccagttgttcatagcaacgcgccaggttgtcctgcagcgggcggacggggaacagcagatgaccaataagtgtcaggacgttgtaccagacggcaccggccagcagatacatcggctgctgataccagtgctcatacagtgatgttcccaacatagtgtaaatggcgatcagcaatgcaccgaaggcaattgttgcatagcgttgacccagaccgccgagcaaaatgaagccgctggtagagagcgttaagccaatcgcaaatagccagggccagggaaacagcaattctactgaggccgaggcgataaaaaagcagaacagcgtaatgatgaggttacgcaaacgtcccgccagtcggtcatcgagatcggtcagcgccgctgccaccatccccagcgttagcggaatcgtcagttttacatcacccagccaccacggaaacgctgtggttccacaaagcgcaataaaaatacgcgcgtaatacagccaggcgctgttccaggtatagcgtttgagcaaaggacttagcataaaggccatattagtggattattcaaaacgacgacgtgcattggcttcacgcgcagcttgcgccgtttctaccgataccacgcgacgaccaaccggccatagtgcaatagcggcaattttaaagttcgcaatgccgacaggaatgccaatgattgaaatacattgtgcgatgcccgttgcaatgtgcatcaggcataaccaccagccaaagaaaatcagccagaaaatattcaataccgtaccgccagtattcagcagcacatttttgccagccgggttcagttcatcgacatgaatagcttcattgccataaggcaccagagacagtttagtgatctcccagcaggatcgtgtcagcggtaaggtaaaaatcagcataatactgaccagagtcgccaacagccagcccagagtggtggcaaatccgccaagcacaaagttcagaatgttcaaaacggtacgcataaaacctcgctttactgtggttttcagtaatgggcggcaattgtaacgtttttttgggctggagcacgttttctctgacggttacactgataagaaataatttcgtgtggatctacagagtcatggaactgaaagcgacaacgcttggaaaacgtctggcacagcacccttacgatcgggcggtgatcctcaatgccgggattaaagtctccggcgatcgccacgaataccttattcctttcaatcaattactggcgattcactgtaagcgcggtctggtatggggcgagctggaatttgtactgccggacgaaaaagtggtgcgtctgcacggcaccgaatggggcgagacgcagcgtttttaccatcatcttgatgctcactggcggcggtggagtggcgagatgagcgaaattgcgtctggtgttttacgccagcaactggatttgattgccacgcgcactggagaaaataaatggctgacgcgtgagcaaacctctggcgtgcagcaacaaatccgccaggctttgtcggcgttgccgttgccggttaaccgactggaagaattcgataactgccgtgaggcgtggcgtaaatgtcaggcctggttgaaagatattgaaagcgctcggttgcagcataaccaggcgtataccgaagccatgcttaccgagtatgcggattttttccgccaggtcgagtcttcaccgctgaatccggcgcaggcccgggcagtcgttaatggcgagcattctctgttagtgctggcaggtgcaggaagcggaaaaacgtcggtgctggtggcccgtgcaggctggttgctggcgcgtggtgaagcgtcccctgagcaaattttattgctggcgtttggtcgcaaagccgctgaagagatggacgagcggattcgcgaacggctacataccgaagacattaccgcacgcacgtttcatgcgctggcgctgcatattattcagcagggcagcaaaaaagttccgatagtcagcaaactggaaaatgataccgctgcccgtcatgaactctttattgctgagtggcgcaagcaatgcagcgaaaagaaagcgcaggcgaagggctggcggcaatggctgacggaagaaatgcagtggtcagtgccagaaggtaacttctgggatgatgaaaaattacagcgtcgccttgcctctcgcctcgatcgctgggtaagtctgatgcggatgcacggtggtgcacaggcagaaatgattgccagtgcacccgaagagattcgcgatctgttcagtaaacgtatcaagttgatggccccgttattaaaagcctggaaaggtgcgctgaaggcagaaaacgctgtcgatttttcgggccttattcatcaggcgattgtgattctggagaaaggtcgctttatcagcccgtggaagcatattctggttgatgaatttcaggatatctcgccgcagcgcgcagcgttgttagcggcattacgcaagcaaaacagtcagacgacgttgttcgccgttggtgatgactggcaggcgatttaccgattcagcggtgcgcaaatgtcgctcaccaccgctttccatgaaaactttggtgaaggcgatcgctgtgatttagacacgacttaccgttttaacagtcgtatcggtgaggtggcaaaccggtttattcagcagaacccaggccagctgaaaaagccgctaaacagcttaaccaatggagacaaaaaagccgtcacgttattggatgagagtcaacttgacgctttgctggataagctctctggttatgccaaaccggaagagcgcattctgatcctggcgcgttaccatcacatgaggcctgccagcctggaaaaagcggcaacacgctggccgaagttgcaaatcgactttatgaccattcatgccagcaaagggcaacaggcggattacgtcatcatcgttggcttgcaggagggaagtgatggttttccagctgcggcgcgggagtcgattatggaagaggcgctactgccaccggttgaggatttcccggacgctgaagaacggcggttaatgtacgtggcgctgacccgggcacgccatcgggtatgggcactgtttaacaaagagaatccctctccctttgtggaaatactgaaaaatctggatgtgccggtggcgagaaaaccgtaagaaacaggtggcgtttgccacctgtgcaatattacttcagacggtccgcgagataacgctgataatcggggatcagaatatcgaccgcgtcgttgaaatgcggcgactggataatgaagtctgccgttgccacgttggtggcgaccggaatgttccataccgtcgccagacgcagcaaggctttcacgtcaggatcgtgcggcacggcatttagtgggtcccagaagaaaatcaatacatcaattttcccttctgagatcaatgcgccaacctgctggtcaccccccattgggccactcaacatcgcgttgatgttcatgccggtcgcgcgggaaattaagttaccggtagtgcctgttgcatacagtacgtgttgttccagtaacggttgatgccgttccacccagctcatcagcatttgtttgcagtgatcgtgtgccaccagcgcaatatgtttccgcgcaggtaaagtgcgagtcgtcagttccataatgtacatccgtagttaactttcctacagattactgtaagcacttatcgctgcaagataaagaccgaaaaagcctgcgcacaggcacaaaaatctcaggaagatggttgtttttccgcccattgcaggaaagtatttcgcgtttgtgggtcagccagtttaaaccaatacttcagccgttgttctgtgagcacctgagactgcggtggaatagcatccagctcggaaacacccgaaagcagcgtactgtcatctgccatcatcgtggcaaattgcggtagtgaagcgcgtttcgcggatttgttatagcgttcaacctcgacctcataatcaatcgtttttgccgttgaggtaatggcgagaatatccagctttaccggaattggcgtcgcatcgccatccaacaattcaaggtgcggcgcggcatcaaaatggttagcttcccgctcattctccaggcgaggcaggcgaaaattgacctggttgatgagctgggtattaaaactgaccaccagcggtggggagatatacagccgttcttcactattggaaagatgaatcgtcttctcaacgcgaaacactaactgatgcggtccattatccagttcaatgctgtccgcaccgcgcagcagagagctggaaaccttcttgccgtcgagtaccagaagatcgacatcggttgaaagccgcagcgtggtggcaaaaacggataccggcaaacataatgcaatcaaggtggtcacgatgccggttttcataggtagctcctgtcaaaagaccgcccgaataataatgtgtcaaaatttttctttaatcatacttactaacatatagacatatttcccgcttttgctctcattcattcgtattagctgcatggttggcatgtcggctttgtcgtacactttgttaaacagtctggaggaaataatgaaagaaaccgatattgcaggcattttaacgtccactcacaccattgcgctggtgggggcaagcgacaaacccgatcgtcccagctatcgcgtgatgaaatatctactcgaccaggggtatcacgtcattccggtttcgccaaaagttgccggcaaaacgctgctgggccagcaggggtatggcacgctggcagacgttccggaaaaggtcgatatggtcgatgttttccgtaattcagaagcggcgtggggcgtggcacaggaagctattgccattggcgcgaaaaccctctggatgcaactgggggtgattaatgagcaagcggcagtactggcacgggatgccgggttgaatgtggtgatggatcgctgcccggctattgagatccctcgcctgggcctggccaaataaaaaatccccggaaggcaaaaaccttccggggattcgttcagggatcagttacgcagacgcggggcctggagttgtttgcggatggtctgcgccagctcatccatggatggctgttcaggatgttcatcctgcaattcgctacttagctgggcttcagccaggtaggtatgaaccggtaggccgttatcgtcctccatcaccacgtgataccacggagcggcgcgaagctcgtcattcaccgccagctcatcaggcgacggttcagagagcgaataaaccgggtcgatatccacgaccactccgagataacctaacagggaatggcggacctgctggccgataccgaatttgctggcaatcatagtcacctcccgggaaatctttacctttgatataagggtaaaattccacatttcaagttacatgacgcgacaggcaaaccctttcagatatagcccttccggataggtagcgatcaccggatgatcggctgcctgacggaactgctctataaattgtacatcacggccggcatcaattgcggcatccgcgatgattttctgaaataaatcgctggtcatcagaccggaacaggagaaagtcaggagaataccgccttcattcagcaactgaatcgccagcatgttgatatctttatagccacgacacgcgcccatcaactggcttttattctcaacaaacttcggcgggtccatcacgataacgtcaaatttttcaccgcgatcgcgataagtacgcagcaatttaaagacatcatcacggacaaactcagccttgctcagatccagtttgttcagctcaacgttctgccgtgcaatatccagcgcttcctgggaggtatcaacgctgacaacctggctgcaaccgcccatcagtgccgatacggcgaaaccaccggtataggagaaacagttcagcacacgtttattttcaacgtagcggcgggtagccaggcggctatcacgctggtccaggtagtagcccgttttgtgtccgtgctgaatatccaccagcagtttcatgccgtgttcttcaatcggcagcagggcaggtggcaactcgccggtgacgaggccctgggtcagctccatcccttcttttttacgtaccgcaacatcgctgcgatcgtaaatcgcacattccgggtacagcgtttgcagggcactaattaatgccgcgcgctgatattctgcgccagcactcagcagttgcagcaccagaaaattaccgaaacgatcgatagtaatacccggcaggccatcagattctccggcgattaaacgatagctgtcgaggccatcttttgcgccagccagtcacgccatttttgtgcttgttgcaaacggcgggaaaaaaagcaatgtcgatagactcagacgggtcaaacgtccagacgcgcgcccggatttgcgaagctggtgaataagcgccgcgtgctaaccattttccctgatgatcaacaatatcgatggtttcaccgaggctggctttaccttccatgcgggcaacggccccggaaaagacccacggatggcgacgaagtaatgatttttcgcgccctttggctaacactaaacgtacactcataatttacttttctgtcgatgcaaagaaatgggcgtcattgtccggagttttccatggatttgcaacgcgtccattaaggataaggagagcagcaatgtcgaaagtctgcataattgcctgggtttacgggcgagttcagggcgtaggatttcgctacaccacacagtacgaagcgaaaagactgggtttaaccgggtacgccaaaaatcttgacgatggcagcgtggaagtggttgcctgcggtgaagaagggcaggtggaaaaattaatgctgtggttaaagagtggcggcccgcgttctgcgcgtgtggaacgggtgcttagcgagccgcatcatccctcgggggaattagccgattttcgtatccgttaaatacattttaccggttttggcaggccagcaattttggtggcttgcttagccggacctttcggaaacagtcgatataaatagcggctgttacctttttcttcgccaaatttattcgccatcgcttttaccagcatacgaatcgccggagaagtattgaattccagatagaaatcacgcacaaaacgcaccacttcccagtgttctggcgacagcgaaatcccttcgttctctgcaatcaccacagccagcggctcactccactggctgctttctttgagatagccttcggtatccgtttctatctctttaccttcgaagatcagcataattattactaccttaatcagactggcggcagtgtaacaaaaaacaaagccccgcataaagcgaggctatgaaagtgttagcgggtgagattaatcgcggctagcgaagcccagaatgctcagcaggctgacgaagatgttgtacagcgaaacatacaggctaaccgtggcacgaatatagttcgtctcaccgccatgaatgatgttgctggtttcaaacaagatagcgccagaggagatcagaatgaagaccgcgctgatcgccagatgcagagcaggcagttgcaggaagatattagcaaccataccaatcagcaccaccacaatacccgccatcagcataccgccgaggaacgacatatctttgcgggtggtcagcacatatgcagagcagcagaagaacactaacgccgttccgcccagtgccatagcgattacgtcacccattccggcagacagataggtgttcagaataggtccgaggatataacccagaaaaccggtaaaggcgaatgcggagataatcccggtcggcttattcgccgttttataggtcaggaacatcaaaccatacatacccaccagcgtcagaatcagacccggagatggcagcatcagcaccgtactggcagttgcggtaatcgccgaaaaggccagcgtcaggctcagcagaaaataggtattacgcagcaccttatgggtgctaagcagtgatgtacggtcatgtgaagaactaacaatacgatccattgagtcactctctatgacagatgtaattaattaagcagcataatgataatgcgtaagggcacccagaagttttacccatctttacgcatttgatctggaacaggtttaacagcggattatcaggtcattaagcaaatataacgccctgagaatttcgacaggcaaaagaaaaaggggttagcatttagctaaccccttatcttatttggcggaagcgcagagattcgaactctggaaccctttcgggtcgccggtttymaagaccggtgccttcaaccgct

SEQ ID NO: 483 - DNA, 41 bp, Escherichia coli
  modified_base (3)..(13): a, c, t, g, unknown or other
  modified_base (20)..(20): a, c, t, g, unknown or other
  modified_base (22)..(22): a, c, t, g, unknown or other
  modified_base (29)..(33): a, c, t, g, unknown or other
  modified_base (37)..(37): a, c, t, g, unknown or other
ggnnnnnnnnnnnaaaatcngnctgactnnnnngcantttt

SEQ ID NO: 484 - DNA, 1124 bp, Escherichia coli
agggatccctgccgttcgtatgaacggcgcaaaatcgtgttgtcgaagttggctccatttccccaaacctgaacaaaaaattcaccggagttttcatcgataaattcccgcaattgtaacagtgcatcatctaacgggatttcatcggtcataatggcagattgcgcttcgcgtgattgcttaagccaccttttaatgacgtcacgatcaatgactccgccagcagtttccagatcgatagtcttactaaattccggtcccatatctccggtttgcggatcgaaaaatattgcacctattgagataatcggggcatcaggattttttcccatggtttcaaggtcgatcattagatggtcacacgtcctgctggtggatgtgataacgtgatgaccgttcatcgtaattaagggatctgccgtctcgccagtttcactatcgctggcgtgatcctgagcgctaccagcattctccttgtgtggatgttcagcgccttccatttccttcggatcattttcctgaacttcaacctgattctcttcatcgaatgtttcctggtatgttgcgtcacccatcaccgcgccacaatcagggcagttgccgccaccgctttgaccgcaggcggtgcagactttttccggttcctgttgcgctactggctcaggttgttttgtttctggctcgttttgttgcgtatttgggctgttttgttccgctttctggtcgttctgttccgattctggccgttctgttccgwttcttgctggttctggtttacagaatcgcgggtttcaatcccctttacccatttcggatcattcgggtcgctaatccctgcaacaaattctccgcgagaggcagcaagcaacttatcggcgtcaggctggctgatattggctgcctgcataattttgtttacttcgtcagcggtaacttttaccggctctggttgtgcggtcgtgtcagatgcaccagtattttgttgtgaacctgagtacgtgccgtttttacgtgcgaagtattcctcttttgtgatttccgtagctcccaaggctagtgctttttccagaccagaaagtttgtttgcgcgaccgtatttttcgccatccttgtcggtgaagagg

SEQ ID NO: 485 - DNA, 801 bp, Escherichia coli
  modified_base (789)..(790): a, c, t, g, unknown or other
  modified_base (793)..(801): a, c, t, g, unknown or other
acttccactttgcattcggttttttcgttgcccggaattgccgtttccactgcatcagtttctggtactggcgacgagagagtatcagttgcgctctgatttcttccttcatcttcaaacacgccctttgtagtcaggtattcagtaatgtatttgttcagtgccacagggtctttgtgaatgtcgatcggacgttcacggacaaggccaaaaatagtctggcggtcgtagcgaagggcatcaggctgtttgcgcattgatgccgagatacgcttccagtcttcgcggtcgttgtcgataacttcattttttgcccagcgatggatgctgccgtcaatgtttccggcatccacatcaccaggccagagagcgtaggccagttcgtcatccagtgttttccatgtctgcttgtattcgcgatgaatggcagcaatgaccgggctgatttttcctgttgaattttcactgtgctgttgattggttctggcgcgggcgagatcaacaacagacgtgtattttccggtttccttgcgttcaccttcgcgacgtttttccagatgcgcatctctgcctgaatttcgggccatttggcaccaggcttacatttatgcttaacccacccgatggcatgcagcttaagctccggatacatggcgttaacttctggcattttcatcaacgcttcaacgatatgtccgtcgaatgttgccatgtcttcctgcaacaattcctgtgcgctaataaccatatcaacggtgatgttttcacatgtgtcgaacttaaccatgnnagnnnnnnnnn

SEQ ID NO: 486 - DNA, 237 bp, Escherichia coli
gcagacaagaaatttataagcgcagtcctgagcagccggataatgctccaggaattgccagtgaaattttgcgcgggcgcgacgttcatcaccggcttcaatggcagtggctacagcgacggcaccttcttcctttattgcctgttcgtccggaatggcggcgcaaataaagactttactcattttgttttacctcattacagatttaagggtgaacaaatccctgccattgctggc

SEQ ID NO: 487 - DNA, 600 bp, Escherichia coli
  modified_base (310)..(310): a, c, t, g, unknown or other
  modified_base (336)..(341): a, c, t, g, unknown or other
cgttcgtgttttctcttgttaatggcatcttcagtaaatacagggttactgatagtgacaccaatttcaaaacaaccttcagacgtattaacgtttggtaataacgtttccattatcgcgtcctcaacaatgaattttgtgatgcggtgcctggtgcctccaggtgacgttaaccagttaacaattaacgccggatacagagaatccacccataacactgtttttggtttaactgttccgcgtgcgctcagccgcattcaccacatcacaaaattcactttaaaaagggcggcagagcagtcacggagtnaaactgataccgccaaacgtcaccannnnnntgataacagagggcgttgcagcggggttgtcacttaagcgtatggtcaacctgacaacccggtgtcctcaacgggggaaggaataaccccgccatacttaccgccgcgcccatttcgcggrttgccacaaccgggaagcgcacggtcgacgaaaatttaacgacaggctatctatgaaccagctacctcgccgtgcgctttcgcgttatggtctgactttcagggaaatatccttcagtaactgtcagtgccggattct

SEQ ID NO: 488 - DNA, 62 bp, Escherichia coli
  modified_base (1)..(4): a, c, t, g, unknown or other
  modified_base (14)..(14): a, c, t, g, unknown or other
nnnntgccggatgntcacccgtgtccggcgcacgcactccacctgacccgtggagaactcct

SEQ ID NO: 489 - DNA, 182 bp, Escherichia coli
cggttttaaacgttttacttttggtatacgtcatcgcggtgaaggtgccgtcctggttagggaacacaccgcataccagagattcgttgttgccaagatcgatagtatccatgctgacctcatttccccttaacgccggggtagcggaacaaaaacctgctgcatagttattaaagttgaac

SEQ ID NO: 490 - DNA, 42 bp, Escherichia coli
  modified_base (4)..(8): a, c, t, g, unknown or other
  modified_base (11)..(13): a, c, t, g, unknown or other
  modified_base (25)..(25): a, c, t, g, unknown or other
  modified_base (33)..(36): a, c, t, g, unknown or other
  modified_base (41)..(41): a, c, t, g, unknown or other
atgnnnnncgnnnttgacgcactgnaagcaatnnnnaaagnc

SEQ ID NO: 491 - DNA, 901 bp, Escherichia coli
  modified_base (541)..(541): a, c, t, g, unknown or other
  modified_base (554)..(554): a, c, t, g, unknown or other
tctgaagcttgcagaatgcatcggtgttactgccggagtccgtgaacttagtctgcatgaatcaccacagctthaadhgggtaatgactccaacttattgatagtgttttatgttcagataatgcccgatgactttgtcatgcagctccaccgattttgagaacgacagcgacttccgtcccagccgtgccaggtgctgcctcagattcaggttatgccgctcaattcgctgcgtatatcgcttgctgattacgtgcagctttcccttcaggcgggattcatacagcggccagccatccgtcatccatatcaccacgtcaaagggtgacagcaggctcataagacgccccagcgtcgccatagtgcgttcaccgaatacgtgcgcaacaaccgtcttccggagcctgtcatacgcgtaaaacagccagcgctggcgcgatttagccccgacatagccccactgttcgtccatttccgcgcagacgatgacgtcactgcccggctgtatgcgcgaggttaccgactgcggcctgagtttttnaagtgacgtaaantcgtgttgaggccaacgcccataatgcgggcagttgcccggcatccaacgccattcatggccatatcaatgattttctggtgcgtaccgggttgagaagcggtgtaagtgaactgcagttgccatgttttacggcagtgagagcagagatagcgctgatgtccggcggtgcttttgccgttacgcaccaccccgtcagtagctgaacaggagggacagctgatagaaacagaagccactggagcacctcaaaacaccatcatacactaaatcagtaagttggcagcatcaccccctaactaagcaacaataaggaatacactatgactgttcaaacaagtaaaaatc

SEQ ID NO: 492 - DNA, 439 bp, Escherichia coli
  modified_base (3)..(6): a, c, t, g, unknown or other
  modified_base (16)..(16): a, c, t, g, unknown or other
tgnnnncacgcacgancggtattctcacgcatttaagtcagactggtaccarcayccmccatgyactgaagaacaggccgaatggctamattcataactaccgcagacgcggatacgagattaagaaagccctcagcctcgattatcgtcactggataatctccgtcaggcttccttactctgaacgcccaccgcgtccgtcccgcacattccagcaacgcatctggaggtaacgtgcgggtattacttcgacctgttctggtaccggaactcgggctggtgatcgttaagccgggccgtgaatccatgccggtattccacaatacccgggtactggtggagccggaaccgaaaagcatgcgtaatctgccgtccggggtcgttcctgccgttcgccagccgctggcggaggataaatcattactgccatttttcagcg

SEQ ID NO: 493 - DNA, 450 bp, Escherichia coli
cagtaaccagtcagacaatgcgccagcgccatccagcagcacgaatcactcgggcaacttgctcaccaaaacctgtttgcatggatgattgacgtcatacgccatgcaatgaatggctcgcaggaacgggaattatcgctggctgaattatcctggtgggcggtccgcaatcaggtggcggacgcgctaccggaagcggtattacgtcgttcgctggggttgcgtgcggaaaaaatccgctcaatgtaccgtgaaagcgacatcgtaccgggagagcagaccgccaccagcatactgaagcagcgcacaaaaaatcttgcgccgctgcctcacgcccaccagcaaaacccgccacaggaagagacggtggtcagcattgccgttgatcctgagtctccggaatctttcatgaaacgacctaaacgtcgccgctgggttaacgagaaatac

SEQ ID NO: 494 - DNA, 483 bp, Escherichia coli
  modified_base (316)..(320): a, c, t, g, unknown or other
gcctttgcaactggcgtgcttgggtaaaagaggtgactgatgctcatagatttggttttaccttacccgccgacggtgaacacttactggcgacgccgtggcagcacatattttatctcggaggagggaaagcgttatcgccgggctgtggcgcttattgttcgccagcagcggctgaaattaagcctgtccggaaggctggcgataaaggtgattgcagagccaccggataagcgtcgtcgcgacctggacaatattctgaaagcaccactggatgcgctgacgcatgccggacttctcatagacgacgagcagnnnnntgaaatcaatatygtkcgyggtcagcsmgtwyctggtgggcgkmtgggcgtgaagatttaccccataatgcttgaagggcaggtcaaaaaatgaaactggaagatttaccgaaatactactccccmaaaatcccctggcctgaccgatgcatcggcctcaacg

SEQ ID NO: 495 - DNA, 2830 bp, Escherichia coli
  modified_base (337)..(337): a, c, t, g, unknown or other
tacyccmaaatcccctggcctgaccgatgcatcggcctcaacgtcaaaagatgcgctgagtatcactgatgtgatggccgcgcagggcatgacacagaatcgggctgagatggggttttctgcgttcctggggaaaatgggcatcagtatgaatgacagggcgcggggcaacagaattactggcagattatgcactcagtcggtgcgatcgtgtggcggcgttgagaaaacttccggcagaaataaaaccggtagtgatgcgcattatggcttcgtaygcktttgargattatgcccgyagcgcrgcgagyaaaaarcagtgcccttgttgctatgnggaaaaatttattgaaagcgtagtttttacaaacaaggtccagtatccggatggtaagccrccrgtgtgggcaaagtgcacaaaaggcgtgtatccgtcttactgggaagaatggaaaaaagtcagggaggtggtaaaagttgcctgtccggagtgtggcggaaagggtgaggtttccaccgcctgtaaggattgccgtgggcgtggtgtcgccattcatcgtgaagagtcggtaaaacgtggtatgcctgttatcagagattgccagcgttgtggtggtcgtggctgtgaaaggctgccatcaacggaggcatttaatgccatatgcaaagtgacgagtgctatcacgcttgatacgtggaaaaaatcagtgaaacgcttttacgatacgttggtggttcggtttgacattgaagaggcatgggcggagcggcagttaaagagggtaacgcgatagtgttgttgatttttcccgaatctgtggtaaatttgctctaacgatgggcgttttatgcctgacgttagaagattttttacactccgccgcctggcgggttttttatgactgaaatcgcgtcagtacagtaaacgcgctggtggcggtgaatacctgtctttcagcttgctggctttttcgacaagagttattggtgtgtcacgttaaccggaaaagggaaaaagacatgctaaaacagcaggatatgacagaaaccgccagagtggtgtttaatgaattaagcgttaacgacccggcgacagtcggggagattgcgcagaatacttacctttcacgcgaacgctgccagttaatactgacccagctggttatggcgggtctggcagactatcagttcggttgttacagacgccttccgcagtgaaggcttttttatttgtggtaaatgggcggctggtgggtgttaggggcacccaccagccatctgctcatgcgttgggttcacaagcacacctcaggcccactgctttgcgcaaaagcagaatgagcctatcagagacaggcttaatgatccatgcttaatactgtaaaaatatccagttgtgagttaatcaacgccgactgcctggaatttatccggtcgttacccgaaaattctgttgacctgatagtcacggacccaccgtactttaaagtgaagcctgagggctgggataaccagtggaagggcgacgatgattacctgaagtggctggaccagtgtctggcgcagttctggcgggtgctgaaacctgtcggaagtctttacctgttctgtggtcatcgcctggcatctgatatcgaaatcatgatgcgtgaacgcttcagtgtgctgaaccatattatctgggcgaagccgtccggacgctggaacggatgcaacaaggaaagcctgcgggcgtatttccccgccacagagcgcattctgttcgcggaacattatcaggggccgtatcgtccgaaagatgccgggtatgcggcgaagggcagtgcactgaaacagcatgtgatggccccgctgatttcttactttcgtgatgcgcgcgcggccctggggataacggcaaaacagattgcagatgccacaggaaagaaaaacatggtgtcgcactggttcagtgccagtcagtggcagctaccgaacgaaagcgattatctgaaattacagtcgctgtttgcccgggtggcagaagagaaacatcagcgcggtgaactggaaaagccccaccaccagctggtggatacgtatacgtcactgaaccggcagtatgtggagctgcagagtgaatataagcatctgcggcggtattttggtgtgacggcgcaggtgccgtacacggatgtgtggacacataaaccggtgcagttctatcccgggaaacatccgtgcgaaaaaccggcagaaatgctgcagcagataatcagcgcaagcagtcgtccgggtgacctggttgcagatttttttatgggctcaggttcaacggtaaaagctgcactggcgctcgggcgtcgtgcgattggcgttgaactggagaccggacgttttgagcagacagtcagggaagttcaggatttaatcgtttgaaacggatgagattgcagaattaattacgcaccattattattctgcttccggccctttagctcagtggtgagagcgagcgactcataatcgccaggtcgctggttcaaatccagcaagggccaccatatcacataccgccattagctcatcgggacagagcgccagccttcgaagctggctgcgcggggttcgagtcctcgatggcggtccattatctgcattatgcgttgttagctcagccggacagagcaattgccttctgagcaatcggtcactggttcgaatccagtacaacgcgccatatttattttccctggctcgcttttgcgggcyttttttttaaatgtctcacaattcagrcggttgactgttgtctggttgatcttgggcattcgttcgttgttattgatga

SEQ ID NO: 496 - DNA, 477 bp, Escherichia coli
tgactgttgtctggtttgcggggagtttgttaaaagaaactggcatggtgaatccccctgtgcggaggggcaatcagcgagtaggtatatgggataatcgcggattcaggtgctggtactgaattcaccgggaggcacccggcaccatgcaatggcacatagcgccactctccagcccctctccggaggggctttcttatggacaaaaaagcccgcgctgggagacgcgggcggcaaggaataaacaatgaaacgtgaagtaatatttcagctggcgaataataccccatagtaatcactctgcgcaactgcgcggcctttttcgtatttcgggctgtagtcttccttctgccattgtcctgtaacttccggacttcagcccgctcctcatctgactcacacattatcccgaccgggaggattcatggcatttaaacactatgacgtggtcagggcggtgtcgccgtcagaccttgc

SEQ ID NO: 497 - DNA, 635 bp, Escherichia coli
  modified_base (620)..(620): a, c, t, g, unknown or other
aactgaagaggctggcagcgttgtacgtcgtgscataaccccttataccctgatgcaggcgattgcagcagaaggtgatgtggtcgtcagtggtgcaactgagccggagtggtactacgtcatcgtactggccggcagtccaatgccatggcttacggtgaagggcttccgcttccggattcatacgatgcgccccatccgcgcattaagcaactggcccgtcgtaacacagtgactcccggtggtgaagtatgcgtatttaacgacatcattcctgctgaccattgtctgcatgatgttcaggatatgagtacgattaaccatccccgggctgacctgagcaaagggcagtacggctgtgtcggmcagggcttacatattgccaaaaaactgcttccgtatatccctaataatgcggggatcctgctggtaccatgctgtcgtggtggttcggcattcacccagggcacggaggggacattcagcgagtccacgggggccagtcaggattcggctcgctggggagtgggtaagccgttatatcaggatctgcttttccgcacgaaggcagcattgcagaaaacccgaaaaacgttttgctggcgatatgctggatgcanggggaattcgatatg

SEQ ID NO: 498 - DNA, 284 bp, Escherichia coli
gcttttccgcacgaaggcagcattgcagaaaaacccgaaaaacgttttgctggcgatatgctggatgcagggggaattcgatatgacgaatgccagttacgcccagcagccagcagcatttcttgcaatggtacagcagttccgtgctgaccttgccgggctggcagcgcagtgtcacggtggaagtccggcatcagtcccctggatttgtggcgacacgacatacgcgtggaaacaagaacacggtacgcaatatgaagtggtatatggtgcatataaaggta

SEQ ID NO: 499 - DNA, 927 bp, Escherichia coli
cgacacgacatacgcgtgaaacaagaacacggtacgcaatatgaagtggtatatggtgcatataaaggtaaagaatcccagcagatttattttgttccctttatgaccgatggtagcggagttaatacaccgacaaacaacccgtcagaagatcctgatattgccgggtctggttattacggttcggcatcccgaacgaacaaaactgggtatcatcaaatcgcccgacgcatttcagctcatgggcgcgtcgtggcattattcccgatcgtatggcaactgctattctgaacgtagccgggcgcacctcagccttcatcagtggtaaggcaccggaaatcaaaccctcgcccggcggcgacacgccatcgggtccgtctgcagatacgtccgttcgcacaatctccctgctgccgacagccggagaggctgctgcgcagggctggaccattaaggacggcggaattcagttgtcgggtggtgtatttaagatcgccaagcagagcaataaagcctggtccctgacgcgcccggtggatgacgcagtctccctgctgacacggggtggcagactgagctgtaagtttcgactgtcaggcgcactgaccaacaaccagttcggtctgggaatttatctgtataccgatgtagcgttacctgacgtcgtggcgatgaccgggactggtaacccgttcctgatgtcgttcttcacccagaccacagacggcaaactgaatctgatgcatcacaagaaagcaggaaacacaaagttgggcgagttcgggaattacagtaacgactggcagacgctggagctggtgttcaccgccggcagtgccacggttactccgaaactgaatggagtggctggcccggcattccaggtcataaagacagtctgacactgggctgaatgcgctgacgtta

SEQ ID NO: 500 - DNA, 172 bp, Escherichia coli
  modified_base (1)..(12): a, c, t, g, unknown or other
  modified_base (16)..(27): a, c, t, g, unknown or other
  modified_base (34)..(36): a, c, t, g, unknown or other
  modified_base (39)..(41): a, c, t, g, unknown or other
  modified_base (45)..(45): a, c, t, g, unknown or other
  modified_base (163)..(163): a, c, t, g, unknown or other
  modified_base (170)..(170): a, c, t, g, unknown or other
nnnnnnnnnnnntgannnnnnnnnnnnctggacnnngannnggcnggggcagaaatctgcaggtgataccagttttacgctggcctggaaaccgggagaggaatgtcagaaagggcttataggctggtttgaaagcggcgatgtccgggcctataaaatccgntttccgnat

SEQ ID NO: 501 - DNA, 255 bp, Escherichia coli
gaaaggcttataggctggtttgaaagcggcgatgtccgggcctataaaatccgttttccgaatggcacggtggatgtgtttcgtggctgggtcagcagtatcggtaaggccgtgacggcgaaagaagtgatcacccgcacggtgaaagtcactaacgtgggtaaaccttctgtagcggaagaacgcagcaaaattacgccggtcagtgcgattaaggtgacgccgacatccggtacggtggcaaaagggaaaaca

SEQ ID NO: 502 - DNA, 401 bp, Escherichia coli
ctgaaacggcgtgcagaacaggcagaatcctgcggcaacctgcaggttagcgtggaagatctcgtcagaaccggcgcgtttctggtggcgatgtccctgtggcataaccatccacagaaaacgcagtcaccgtcaatgaatgaggccgtgatgaagatagagcaggaagtgctcaccacctggcctgccgatgccattgcccgggcggaagacgtggtgttgtgcctgtccgggatgatcgaagctgttcgtccggatactgatattactgaagtggcgaaaaataacacgctgactgatgatgatttttctgcgggaaagtcttcgacggcaccgttacgtcctgagcaattccgaatccgaatgttaacagcccttaccggtaaccggttccttggagg

SEQ ID NO: 503 - DNA, 281 bp, Escherichia coli
  modified_base (252)..(264): a, c, t, g, unknown or other
  modified_base (267)..(268): a, c, t, g, unknown or other
  modified_base (273)..(281): a, c, t, g, unknown or other
atactgatattactgaagtggcgaaaaataacacgctgactgatgatgatttttctgcgggaaagtcttcgacggcgagctgaactttgccctcagactggcgcgtgagatggggagacccgactggcgcgccatgcttgccgggatgacatccaccgaatatgccgactggcaccgttttaccgcacgcattattttcaggatacccagctggatatgcattttccgggctgacgtacgctgtactcagcnnnnnnnnnnnnnatnnggatnnnnnnnnn

SEQ ID NO: 504 - DNA, 847 bp, Escherichia coli
  modified_base (3)..(15): a, c, t, g, unknown or other
  modified_base (18)..(21): a, c, t, g, unknown or other
  modified_base (26)..(26): a, c, t, g, unknown or other
  modified_base (32)..(32): a, c, t, g, unknown or other
cannnnnnnnnnnnnttnnnntcggncagtanaaagcggccatgcgaaccctgcccgcacagtttacggatatcgccacgcagcttgccggtggtcagaatccctggttgatcctgctgcaacagggcggtcaggtgaaggactccttcggcgggatgatccccatgttcagggggcttgccggtgcgatcaccctgccgatggtcggggtcacctcgctggcggtggcgacaggtgcgctggcgtacgcctggtaccagggcgacgccacgctttcagaatttaataaaacgctggtcctttccggcaatcaggccggactgactgccgatcgtatgctgacgctctcaagagccgggcaggcagcagggctgacgtttaaccaggcgagagagtcactggcagccctggtgaatgccggtgtgcgtggtggtgaacagtttgatgccatcaaccagagtgtcgcgcgttttgcgtctgcatccggtgtggaggtggataaagtcgctgaagccttcgggaagctgaccactgaccgacgtcgggactgatggcgatggcgcgccagttccgtaacgtgacggcagagcagattgcgtatgttgcacagctgcagcgttccggagacgaggccggggcattgcaggcggcgaacgatatcgccacgaaaggctttgatgagcagacccgtcgcctgaaagaaaacatgggaacactggagacctgggcggataaaacagggaaggcattcaaatcgatgtgggatgccattctggatatcggtcgtccggaatcctcagcggatatgctcgccagtgcgcagagggcatttgatgaggcggataaa

SEQ ID NO: 505 - DNA, 510 bp, Escherichia coli
  modified_base (255)..(260): a, c, t, g, unknown or other
  modified_base (262)..(267): a, c, t, g, unknown or other
  modified_base (495)..(495): a, c, t, g, unknown or other
  modified_base (506)..(510): a, c, t, g, unknown or other
atatcggtcgtccggaatcctcagcggatatgctcgccagtgcgcagagggcatttgatgaggcggataaaaaatggcagtggtaccagagccggagccagcgccggggaaagacctcctcttttcgtgcgaaccttcagggggcatgggatgaccgggaaaatgcccgtctgggtctggcagcggccacgctgcagtcggatatggaaaaagccggtgaactggcggcaagggacagggctgagcgtgagtcgnnnnnncnnnnnnataccggagaggcgcagaaggcktaygarcgsctgcwgacgccactggakaaatataccgcccgtcagaaagagctgaataaggccctgaaagacggaaaaatcctgcaggcggattacaacacgctgatggcgtcggcaaaaaaggattatgaatcgacgctgaaaaagccgtcaggtgtgaaggtgtctgccggtgagcgccaggaagaccrggcgcatgcagccntgctggcgctnnnnn

SEQ ID NO: 506 - DNA, 846 bp, Escherichia coli
ggacgctggaaaaacacagcggtgtgaatgagaaaatcagccagcagcgccgggatttatgggaagcggaaagtcagtatgtggtcctgaaagaggccgccacgaaacggcagttatctgagcaggaaaaatccctgctggctcatgagaaagagacgctggagtacaaacgccagctggctgagctgggagacaagattgaacaccagaagcggctgaatgagctggcacagcaggcggcgcggtttgaacagcagcaaagcgcgaagcaggcggcaatcagcgcaaaagcccgcggcctcaccgaccgtcaggcgcagcgggagtcggaagagcagcgccttcgtgaggtgtacggtgataatccggctgcgctggcgaaggccacatcggcactgaagaacacctggtctgcggaggagcagcttcgtggaagctggatggccgggatgaagtccggctggggagagtgggcggaaagtgcgacggacagtttttcgcaggttaaaagtgtggccacgcagacctttgacggtattgcacagaatatggcggcgatgctgaccggcagtgaacagaactggcgcagcttcacccgttccgtgctgtccatgatgacagaaattctgcttaagcaggcaatggtggggattgtcgggagtatcggcagcgccattggcggggctgttggtggcggcgcatccgcgtcaggcggtacagccattcaggccgctgcggcgaaattccattttgcaaccggaggatttacgggaaccggcggcaaatatgagccagcggggattgttcaycgtggtgartttgtcttcacgaaggaggcaaccagcc

SEQ ID NO: 507 - DNA, 1969 bp, Escherichia coli
  modified_base (1)..(7): a, c, t, g, unknown or other
  modified_base (28)..(28): a, c, t, g, unknown or other
  modified_base (31)..(31): a, c, t, g, unknown or other
  modified_base (1960)..(1960): a, c, t, g, unknown or other
nnnnnnnaccttccgctggaaagtgaanccnggtatggatgtggcttcggtcccttctgtaagaaaggtgcgctttggtgatggctattctcagcgagcgcctgccgggctgaatgccaacctgaaaacgtacagcgtgacgctttctgtcccccgtgaggaggccacggtactggagtcgtttctggaagagcacgggggctggaaggcctttctgtggacgccgccttatgagtggcggcagataaaggtgacctgcgcaaaatggtcgtcgcgggtcagtatgctgcgtgttgagttcagcgcagagtttgaacaggtggtgaactgatgcaggatatccggcaggaaacactgaatgaatgcacccgtgcggagcagtcggccagcgtggtgctctgggaaatcgatctgatagaggtcggtggagaacgttattttttctgtaatgagcagaacgaaaaaggtgagccggtcacctggcaggggcgacagtatcagccgtatcccattcaggggagtggttttgaactgaatggcaaaggcaccagtgcgcgccccacgctgacggtttctaacctgtacggtatggtcaccgggatggcggaagatctgcagagtctggtcggcggaacggtggtccggcgtaaggtttacgcccgttttctggatgcggtgaacttcgtcaacggaaacagtgacgccgatccggagcaggaggtgatcagccgctggcgcattgagcagtgcagcgaactgagcgcggtgagtgcctcctttgtactgtccacgccgacggaaacggatggcgctgtttttccggggcgtatcatgctggccaacacctgcacctggacctatcgcggtgatgagtgcggttatcacggtccggcagtcgcggatgaatatgaccagccgacgtccgatatcacgaaggataaatgcagcaaatgcctgagcggctgtaagtttcgcaataacgtcggcaactttggcggcttcctttccattaacaaactttcgcagtaatcccatgacagagacagaatcagcgattctggcgcacgcccggcgatgtgcgccagcggagtcgtgcggcttcgtggtaagcacgccggagggggaaagatatttcccctgcgtgaatatctccggtgagccggaggcgtatttccggatggctccggaggactggctgcaggcagaaatgcagggtgagattgtggcgctggtccacagccaccccggtggtctgccctggctgagtgaggctgaccggcggctgcaggtgcagagcgatttgccgtggtggctggtctgccgggggrcgattcayaagttccgctgtgtgccgcatctcaccgggcggcgctttgagyacggggtgacggactgttacacactgttccgggatgcttatcatctggcggggattgagatgccggattttcatcgcggggatgactggtggcgtcacggtcagaatctctatcttgacaatatggaggctactggtttttaccgtgtcgcactgacagaggcgcagccgggcgatgtgctgctgtgctgttttggttcatcggtgccgaatcacgccgccatttactgcggcgacggtgagctgctgcaccatattcctgaacaactgagcaaacgagagaggtataccgacaaatggcagcgacgcacacactccctctggcgtcaccgggcatggcgcgcatctgcctttacggggatttacaacgatttggtcgccgcatcgaccttcgtgtgaaaacgggggctgaagccatccgggcactggccacacagctcccggcgtttcgtcagaaactgagcgacggctggtatcaggtacggattgccgggcgggacgtcagcacgtccgggttaacggcgcagttacatgagactctgcctgatggcgctgtgattcatattgttcccagagtcgccngggccaagt

SEQ ID NO: 508 - DNA, 308 bp, Escherichia coli
  modified_base (298)..(298): a, c, t, g, unknown or other
aycctgttttctctcggtgccagtatggtgctcggtggtgtggcgcagatgctggcaccgaaagccagaactccccgtacacagacaacggataacggtaagcagaacacctatttctcctcactggataacatggttgcccagggcaatgtcctgcctgttctgtacggtgaaatgcgcgtggggtcacgtgtggcatctcaggagatcagcacggcagatgaaggggatggtggtcaggttgtggtaattgggcggtaatattattttactcatgttctaactgmctgcgggcggntttgtcgttt

SEQ ID NO: 509 - DNA, 51 bp, Escherichia coli
  modified_base (1)..(2): a, c, t, g, unknown or other
  modified_base (10)..(11): a, c, t, g, unknown or other
  modified_base (14)..(14): a, c, t, g, unknown or other
  modified_base (17)..(21): a, c, t, g, unknown or other
  modified_base (32)..(32): a, c, t, g, unknown or other
  modified_base (40)..(40): a, c, t, g, unknown or other
nngcatgacnnatnggnnnnngcagcagtaangggcatancccgcgcgaag

SEQ ID NO: 510 - DNA, 445 bp, Escherichia coli
gacggattaaaaaagcgtgctgctgaacagtacgccggtgctggacagtgaggggaataccaatatatccggtgtcacggtggtgttccgggcaggtgagcaggagcagacaccgccggagggatttgaatcctccggctccgagacggtgctgggtacggaagtgaaatatgacacgccgatcacccggaccatcacgtcggcaaacatcgaccgtctgcgctttaccttcggtgtgcaggcactggtggaaaccacctcaaagggggacaggaatccgtcggaagtccgcctgctggttcagatccagcgtaacggtggctgggtgacggaaaaagacatcaccattaagggcaaaaccacctcgcagtatctggcctcggtggtggtggataacctgccgccgcgcccgtttaatatccggatgcgcagaatgacgccggac

SEQ ID NO: 511 - DNA, 808 bp, Escherichia coli
gataacctgccgccgcgcccgtttaatatccggatgcgcagaatgacgccggacagcaccacagaccagctgcagaacaaaacgctctggtcgtcatacaccgaaatcatcgatgtgaaacagtgctacccgaacacggcactggtcggcgtgcaggtggactcggagcagttcggcagccagcaggtgagccgtaattatcatctgcgcgggcgtattctgcaggtgccgtcgaattataacccgcagacgcggcaatacagcggtatctgggacggaacgtttaaaccggcatacagcaacaacatggcctggtgtctgtgggatatgctgacccatccgcgctacggcatggggaaacgtcttggtgcggcrgatgtggayaaatgggcgctgtatgtcatcggccagaattgcgaccagtcggtgccggatggctttggtggcacggagccgcgcatcacctgtaacgcttacctgaccacacagcgcaaggcgtgggatgtgctcagtgatttctgctcggcgatgcgctgtatgccggtatggaacgggcagacgctgacgttcgtgcaggaccgaccgtcggataaggtgtggacctataaccgcagtaatgtggtgatgccggatgatggcgcgccgttccgctacagcttcagtgccctgaaggaccgccataatgccgttgaggtgaactggattgacccggataacggctgggagacggcgacagagcttgttgaagatacgcaggccattgcccgttacggtcgtaacgtcacgaagatggatgcctttggctgta

SEQ ID NO: 512 - DNA, 377 bp, Escherichia coli
ccctgaaagaccgccataatgccgttgaggtgaactggattgacccgaacaacggctgggagacggcgacagagcttgtggaggatacgcaggccattgcccgttacggtcgtaacgtcacgaagatggatgctttggctgtaccagccgggggcaggcacaccgcgccgggctgtggctgattaaaacagaactgctggaaacgcagaccgtggacttcagcgtgggcgcagaagggcttcgccatgtaccgggcgatgtyattgaaatctgtgatgatgactatgccggtatcagcatcggcgggcgcgtgctggcggtaaacagccagacccggacgctgacgctcgaccgtgaaatcacgctgccatcctccg

SEQ ID NO: 513 - DNA, 711 bp, Escherichia coli
gggcttcgccatgtgccggcgatgtcattgaaatctgtgatgatgactatgccggtatcagcatcggcgggcgcgtgctggcggtaaacagccagacccggacgctgacgctcgaccgtgaaatcacgctgccatcctccggtaccacgctgataagcctggttgacggtcagggtaatccggtcagcgtggaggtccagtccgtcaccgacggcgtgaaggtgaaagtgagccgtgttcctgacggcgttgcagaatacagcgtgtgggggctgaagctgccgacgctgcgccagcgcctgttccgctgcgtgagtatccgtgagaacgacgacggcacgtatgccatcaccgccgtgcagcatgtaccggaaaagaggccatcgtggataacggggcgcactttgacggtgaccagagcggcacggtgaatggtgtcacgccgccagcagtgcagcacctgaccgccgaagtcactgcagacagcggggaatatcaggtgctggcgcgatgggacacaccgaaggtggtgaagggcgtgagcttcctgctccgtctgaccgtaacagcggacgacggcagtgagcgactggtcagcacggcccggacgacggaaaccacataccgcttcacgcaactggcgctggggaactacaggctgacagtccgggcggtaaatgcccgggggcagcagggcgatccggcgtcggt

SEQ ID NO: 514 - DNA, 289 bp, Escherichia coli
aatggcaacacaaagccgatgtttgttggtcagggcgatcagatattcatgaacgacgtgttcctgaaacgcctgacggctccgaccattaccagcggcggtaatcctccggcattttccctgacaccggacgggcggctgacggcgaaaaatgccgatatcagcggtaacgtgaatgcgaactccgggacgctcaacaacgtcacgattaacgagaactgtcgggttctgggaaaattgtccgccaaccagattgaaggcgatctcgttaaaacagtgggcaaagctt

SEQ ID NO: 515 - DNA, 687 bp, Escherichia coli
ggacgctcaacaacgtacacgattaacgagaactgtcgggttctgggaaaattgtccgcgaaccagattgaaggcgatctcgttaaaacagtgggcaaagctttcccccgggactcccgtgcaccggagcggtggccatcaggaaccattaccgtcagggtttatgacgatcagccgtttgaccggcagattgttattccggcggtggcattcagcggcgctaaacatgagaaagagcatactgatatttactcctcatgccgtctgatagtgcggaaaaacggtgctgaaatttataaccgtaccgcgctggataatacgctgatttacagtggtgttattgatatgcctgccggtcacggtcacatgacactggagttttcggtgtcagcatggctggtaaataactggtatcccacagcaagtatcagcgatttgctggttgtggtgatgaagaaagccactgcaggcatcacgattagctgaattttataacccagatacgggcgccagaaatggcgccttttttattgcagaaaagcgagaggtaattatgcgtaaattatgtgctgttattttgtccgcagtagtctggcaggtcgccgctgctacgccagcgagtgcagcagaacatcagtccacgctgagcgcggggtatctccatgcctcgacgaacgttcccggtag

SEQ ID NO: 516 - DNA, 869 bp, Escherichia coli
cgtcattcagctatgcaggacgacaagaatcgccagctgacccgttacagggggggggrgcgatacccgctggcatgaagattccgtgcgtaaccgctggttcagcgtgatggcggggccgtctgtacgcgtgaatgaatggttcagcgcgtattcgatggcgggtgtggcttacagccgtgtgtcgactttctccggggattatctccgcgtaactgacaacaaggggaaaacgcacgatgtgctgaccggaagtgatgacggtcgccacagcaacacgtctctggcgtggggggctggcgtgcagtttaacccgaccgaatccgtgaccattgaccttgcttatgaaggttccggtagtggcgactggcgaacggatgcatttattgttggtatcggataccgtttctgacaacagacgccgatttatcttctgtaaatattgttatgatacgcaggttcatccaccttatggggtgaactgcgtttgaggaaacgtaaagttacactgtcctgaagcccgtggcgtcactgctgcgggctttttttattggtggaaaagtatgacagtaaaaatttctggcgtgcttaaagatggcacaggaaaaccagtacagaactgcaccattgtgctgaaggccagacgaaccagcagcacggtggtggtgaacacggtggcctctgaaaatccggatgaagccggacgttacagcatggatgttgagcatggtcagtacagcgtcaccctgctggttgaaggttttccgccttcacatgccgggaccattaccgtctatgaaggttccagaccaggtacgctgaatgattttctcggtgccatgacggaggatgatgtccgaccggaggca

SEQ ID NO: 517 - DNA, 187 bp, Escherichia coli
tccgccgtcacatgccggaccatcaccgtgtatgaagattcccgacccggtacgctgaatgattttctcggtgccatgacggaggatgatgcccgtcctgaggcactgcgccgttttgaactgatggtggaagaggtggcgcgtaacgcgtccgcggtggcacagaacacggcagccgcgaagaagt

SEQ ID NO: 518 - DNA, 246 bp, Escherichia coli
  modified_base (219)..(231): a, c, t, g, unknown or other
  modified_base (246)..(246): a, c, t, g, unknown or other
ggaccaaagggggatactggcgctgctggggcaaagggtgagaaaggagccaccggcgcaaccgggccacagggacctaaaggggatacgggagctgcaggcccggcaggrccgcagggacctaaaggggatacgggagctgcagggccggcagggccacagggaccgaaaggggatacgggagcygcaggcccggcagggccacagggaccgaaaggnnnnnnnnnnnnngcaggtccggcaggn

SEQ ID NO: 519 - DNA, 61549 bp, Escherichia coli
tcttrtttggcggaagcgcagagattcgaactctggaaccctttcgggtcgccggttttcaagaccggtgccttcaaccgctcggccacacttccggaatgacgcgcactataaacatcccgatgcggcgtgtaaacccctaatttgtttgtttgcctgaaaaacagccaaaagtgcattgatagcgtgaaataacagcagattgatcatttcatcaccatgaattccttctcttttactcgtttagcaaccggctaaacatccccaccgcccggcaaaaagaaaaataggtccatttttatcgctaaaagataaatccacacagtttgtattgttttgtgcaaaagtttcactacgctttattaacaatactttctggcgacgtgtgccagtgcagaaggatgagctttcgttttcagcatctcacgtgaagcgatggtttgccttgctacagggacgtcgcttgccgaccataagcgcccggtgtcctgccggtgttgctaggagaagagacgtgcgatatgaataacgaggaaacattttaccaggccatgcggcgtcagggcgttacccggcgcagctttctcaaatattgtagtctggctgccacgtcgctgggattaggcgcgggaatggcaccaaagattgcctgggcgctggagaacaaaccccgcattccggtggtatggatccacggtctggaatgcacctgctgtaccgaatcttttatccgctccgctcacccactggcgaaggacgtcatcctttccctgatttccctcgattatgacgatactttgatggctgccgccggaacccaggcggaagaagtcttcgaagacatcatcacgcaatacaatggcaaatatatcctcgcagtagaaggtaatccgccgctgggcgagcaggggatgttctgtatcagcagcggtcgaccgtttattgagaaactcaaacgtgccgctgccggagccagcgcgattatcgcctggggaacctgcgcgtcctggggctgcgtgcaggccgcgcggcccaatccgacgcaggcaacgcctatcgacaaagtcatcaccgacaaacccattatcaaagtacctggctgccctccgatcccggatgtgatgagcgccatcattacttacatggtgacctttgatcgcttgccagatgtcgacagaatgggccgtccgctgatgttctatggtcagcgaatccacgataaatgctatcgccgcgcccacttcgacgccggagagttcgtccagagttgggatgatgacgctgcccgcaaaggttactgcctgtacaaaatgggctgcaaagggcctaccacctataacgcctgttcctccacacgctggaatgatggcgtttcttttccaatccagtctggtcacggctgcctgggctgtgcggaaaatggtttctgggatcgcggttcgttctacagccgcgtggtcgatattccgcaaatgggtactcattccactgccgataccgtcggtttaaccgcgcttggcgtggtggcagcggctgttggtgtgcacgcagtcgccagcgccgttgaccagcgcagacgtcataaccagcaacctacagaaaccgaacatcagccaggcaatgaggataaacaggcatgagcactcagtacgaaactcagggatacaccatcaataatgccggacgccgcctggtggtcgacccgattacgcgcatcgaaggccacatgcgctgcgaagtgaatattaacgatcagaatgtgatcaccaatgccgtctcctgcggcaccatgtttcgcgggctggagatcattctgcaagggcgcgacccgcgcgatgcgtgggcgttcgttgaacgtatctgcggcgtctgtactggcgtacacgccctggcttcggtttacgccatcgaagatgctatcggtattaaagtgccggacaacgccaatatcatccgcaacattatgctggcaacgctctggtgccacgatcatctggtgcacttctatcagcttgccgggatggactggatcgatgtgttagatgcgctgaaagccgacccgcggaaaacctccgaactggcgcaaagtctctcctcttggccgaaatcatccccgggctatttcttcgacgtacaaaaccgcctgaaaaaattcgttgaaggcgggcagttggggatcttccgcaatggctactgggggcacccgcagtacaagttgccgccagaagccaacctgatgggctttgcccactacctcgaagctctcgatttccagcgtgaaattgtgaaaatccacgcggtctttggcggtaaaaacccgcatccaaactggattgtcggcgggatgccttgcgccatcaacattgacgaaagcggcgcggtcggggcagtcaatatggaacgcctgaacctggtgcagtcaattatcacccgcacggcggacttcattaacaacgtgatgatccccgacgccttagccatcggtcagttcaacaaaccgtggagcgaaatcggcactggtctttctgataaatgcgttctcagctacggcgcattcccggatattgccaacgactttggcgagaaaagtctgctgatgcctggcggcgcggtgattaacggcgacttcaacaatgtgctgccagtggatttggttgatccgcagcaggtgcaggagtttgtcgaccacgcctggtatcgatatcccaacgatcaggtcgggcgtcatccgttcgatggcatcaccgacccgtggtacaaccccggcgatgtcaaaggcagcgataccaacattcagcaactgaatgaacaggaacgctactcgtggatcaaagcgccacgctggcgcggtaacgcgatggaagtggggccgctggcgcgcacgttaatcgcttatcacaaaggcgatgctgcgaccgttgagtcggtcgatcgcatgatgtcggcgttgaacctgccgctttccggtatccagtcaacgttaggccgcattttgtgccgcgcgcacgaagcgcagtgggccgcaggtaagttgcagtatttcttcgacaagctgatgaccaacctgaaaaacggcaatctcgccactgcttccacggaaaaatgggaacctgcaacctggccgacagagtgccgtggtgtcggttttaccgaagcgccgcgcggggcgttaggccactgggccgccattcgcgatggcaagattgatctctaccagtgcgtggtgccgaccacctggaacgccagcccgcgcgatcccaaagggcagattggcgcttatgaagcggcgctgatgaacaccaaaatggcgatccccgagcaaccgctggagatcctgcgtactctgcacagctttgacccgtgcctcgcctgttcaacacacgtgctgggcgacgacggtagcgagctgatctccgtgcaggtgcgttaacagcgaaggagaatcatcatgcaacagaaaagcgacaacgttgtcagccactatgtctttgaagcgccagtccgcatctggcactggttgacggtgttatgcatggcggtgttgatggtcaccggatactttatcggcaagccgctaccttccgtcagcggcgaggcgacgtatctgttctatatgggctacatcaggttaattcacttcagcgccgggatggtttttaccgtggttttgctgatgcggatctactgggcttttgttggcaatcgatactcccgcgagctgtttatcgtgccggtatggcgtaaaagctggtggcagggcgtgtggtatgaaatccgctggtatctgtttctggcaaaacgtccgagtgccgatataggccataatcccatcgcccaggcggcgatgttcggctatttcctgatgtcggtctttatgatcatcactggttttgcgctgtacagcgaacacagccagtacgctatttttgcgccgttccgttatgtggtggaatttttctactggacgggtggcaactcaatggacattcacagctggcatcggctggggatgtggctgattggcgcgtttgtgatcggtcatgtctacatggcgctgcgtgaagacatcatgtccgacgacacggtgatctccaccatggtcaacggctaccgtagccacaaatttggcaaaataagtaacaaggagcgttcatgagcgagcaacgcgtggtggtcatggggctgggcaacctgctgtgggccgatgaaggcttcggcgtgcgggtggcggaacggctgtatgcccattaccactggcccgagtatgtggagattgtcgatggcggtactcagggactgaacttgctggggtatgtcgaaagcgccagccatctgttgattctcgatgccattgactacgggctggaacctggaacgctgcgaacctatgccggagaacgcattccggcttatctcagcgcgaagaaaatgagcctgcatcagaacagtttctccgaagtgctggcgctggcagatatccgcggacatctgccagcacatattgccctcgtcggtctgcaacccgctatgctcgacgactacggcggcagcctgagcgaactggcacgggatcaactgcccgctgcggaactatcggcgttggcgcaactggctgcgtggggaattgtgccgcaaccggctaatgaatcgcgctgtctcaattatgactgtctgtcgatggaaaattacgaaggcgttcgtttgcgccagtacaggatgacactggaggagcagggatgagcaacgacacgccatttgatgcgttgtggcaacgaatgctggcgcgcggctggacgccggtcagtgaatcccgtcttgacgactggcttacgcaagcgccagacggcgtggtgttattaagcagtgacccgaaacgtacgccagaggtcagcgataatccggtaatgattggcgaattactgcgcgagtttcccgactatacatggcaggtggcgattgctgaccttgagcagagcgaagccatcggcgatcgctttggcgtctttcgctttcccgccacattagtgtttaccggcggaaactatcgcggtgtgctgaatggtattcacccgtgggcggaactgataaacctgatgcgcgggcttgtcgaaccgcagcaggagcgtgcctcatgagcgaaacttttttccatctgctggggccaggaacgcaaccgaacgatgacagtttcagcatgaatccactgccgatcacctgtcaggtgaatgatgaaccgagtatggcggccctggaacaatgtgctcacagcccgcaggtgattgcgctgttaaacgagttacaacatcaaatgagtcaacgccagccgccgttgggcgaggtgctggcagtcgatctgttaaatctccacgccgacgatcgtcactttatcaatacccttctcggggaaggggaagtgtcagtgcgcattcagcaggctgacgacagtgaaagtgaaatacaggaggcgatcttctgcggattatggcgggtgcgcagacgtcgcggcgaaaagttgctggaggacaaactggaagctggctgtgcgccgctggcgttgtggcaggcggcaacgcaaaatctcttgccgacagattcgctgttaccgccgcccattgatggcctgatgaatggcctaccgttggcgcatgagttactggcacatgtacgtaaccccgacgcgcagccgcacagcattaatctgacgcaattacccatcagcgaggctgatcggctttttctctcacgtctctgtgggccgggaaatattcagattcgtaccattggctatggcgagagctatatcaacgccacggggttacgccatgtctggcatttacgctgtacggacaccttaaaaggccctttactggaaagttatgaaatctgcccgataccggaagtggtgctggcagcgccagaagatttggtcgactctgcgcagcggcttagcgaggtatgtcagtggctggcggaagctgcaccgacgtaaaaagacggtaagtatcgctttcagtcttatgaatatcgcaatcggcgaatacctctggtcgtagagtttcaggataaagagggagatctaccattatcgggttatttttctctcttcgcctacaggagtgcgcatgtgggatgtcattgatttatcgcgctggcagtttgctctgaccgcgctgtatcactttttatttgtaccccttaccctggggctgatttttttgctggctatcatggaaaccatttacgtggtcaccggcaaaacaatctaccgcgatatgacgcgcttctggggtaagctcttcggtatcaattttgctcttggcgtggctaccggcctgaccatggagtttcagtttggtactaactggtcattctattccaactatgtgggcgatatttttggcgcaccactggcgatggaagcattaatggccttcttcctcgaatccacctttgtcgggctgttcttcttcggctggcaacggctgaataaataccagcacctgctggtgacgtggctggtggcgttcggttcaaatctctctgcgttgtggatattgaatgccaacggttggatgcaatacccgaccggtgcgcattttgatatcgacaccctgcgtatggagatgaccagcttcagcgagctggtctttaacccggtcagccaggtgaaatttgtgcacaccgtaatggcgggctacgtgaccggggccatgtttattatggcgatcagcgcctggtatttactgcgcggacgggagcgcgatgtcgcattacgttcgtttgccatcggttccgtcttcggtactctggcgattatcggtaccctgcaactcggagacagttctgcgtatgaagtcgcgcaagtacaaccggtaaaactggcggcgatggaaggggagtggcaaacggaacctgcacctgcaccgttccatgtggttgcctggccggaacaggatcaagagcgtaacgcctttgccatcaaaattcccgcgctgctagggatcctcgccactcactcattagataaacccgtgccgggtctgaagaatttgatggctgaaacctacccacgcttgcaacgcggacgtatggcctggctgttaatgcaggaaatatcgcaaggcaatcgtgagccgcatgtgttgcaggcattccgggaactggaaggtgacctgggctacggcatgttgctctcccgctatgcgccggatatgaatcatgtcacagccgcacagtaccaggcggcgatgcgtggcgcgatacctcaggttgcgccggtattctggagtttccgcatcatggtgggctgtggttccctgctgctactggtgatgctgattgcgcttgtccagacgctgcgtggcaaaatcgaccagcatcgctgggtgctgaaaatggcgctctggagtttgccgttgccgtggattgcgattgaagccgggtggtttatgaccgagtttggtcgtcagccgtgggcgatacaggacatcttaccgacatactccgcgcactccgctttaaccacaggacaactggctttctcactgatcatgatcgtagggctttacaccctgttcttaatcgccgaagtctacctgatgcagaaatatgcccgtctggggccgagcgcgatgcagagtgaacaaccgacgcagcaacaggggtaaaggagaaaatcatgtttgattatgaaacattgcgcttcatctggtggctgctgattggcgtgatcctggtggtctttatgatctccgacggatttgacatggggatcggctgtctgctgccgctggtggcgcgtaatgatgatgaacgccggatagtgataaacagcgttggtgcacactgggaaggcaaccaggtctggttgatcctcgctggtggggcattatttgccgcctggcccagagtgtatgcagcggcgttttccggcttttatgtggcgatgatcctggtgctgtgctcgctgttcttccgtccgctggcctttgattatcgcggaaaaattgccgatgcacgctggcgtaaaatgtgggatgccggtctggtcatcggcagtctggtgccgccggtagtcttcggtatcgccttcggcaacttgttgctcggcgtgccgtttgccttcacaccgcaattacgcgtggagtatctcggcagcttctggcaactgctgacgccattccctttattgtgcggattgctcagccttgggatggtgattttgcaaggtggcgtctggttacaactgaaaactgttggtgtgattcatctgcgttcacagctggccaccaaacgcgctgcactgttggtgatgctgtgctttttgctggcgggttactggctgtgggtcggtattgatggctttgtactgctcgcccaggatgctaacggtccttccaatccgttaatgaaactggtggcagtgctacctggtgcctggatgaataatttcgtcgaatcgcccgttttgtggatcttcccgctgctggggttcttctgcccattgctgacggtgatggcgatttatcgtggtcgcccgggttggggatttttaatggcgtcattgatgcaatttggcgtgattttcacggcaggcatcacgctgttcccctttgtcatgccgtcaagcgtgagtccaatctccagcctgacgttgtgggacagcacttccagtcagctgacgctgagcattatgttggtaatcgtgctgatatttttgcccattgtgttgctctacactctctggagctactacaaaatgtggggacgcatgacaacagaaactctccgccgtaacgaaaacgagttgtactaaggagcaggaacaatgtggtatttactttggttcgtcggcattttgttgatgtgttcgctctccacccttgtgttggtatggctggacccgcgtctgaaaagttaacgaacgtaggcctgatgcggcgcattagcatcgcatcaggcaatcaataatgtcagatatgaaaagcggaaacatatcgatgaaagcgatcttaatcccatttttatctcttctgattccgttaaccccgcaatctgcattcgctcagagtgagccggagctgaagctggaaagtgtggtgattgtcagtcgtcatggtgtgcgtgctccaaccaaggccacgcaactgatgcaggatgtcaccccagacgcatggccaacctggccggtaaaactgggttggctgacaccgcgcggtggtgagctaatcgcctatctcggacattaccaacgccagcgtctggtagccgacggattgctggcgaaaaagggctgcccgcagtctggtcaggtcgcgattattgctgatgtcgacgagcgtacccgtaaaacaggcgaagccttcgccgccgggctggcacctgactgtgcaataaccgtacatacccaggcagatacgtccagtcccgatccgttatttaatcctctaaaaactggcgtttgccaactggataatgcgaacgtgactgacgcgatcctcagcagggcaggagggtcaattgctgactttaccgggcatcggcaaacggcgtttcgcgaactggaacgggtgcttaattttccgcaatcaaacttgtgccttaaacgtgagaaacaggacgaaagctgttcattaacgcaggcattaccatcggaactcaaggtgagcgccgacaatgtctcattaaccggtgcggtaagcctcgcatcaatgctgacggagatatttctcctgcaacaagcacagggaatgccggagccggggtggggaaggatcaccgattcacaccagtggaacaccttgctaagtttgcataacgcgcaattttatttgctacaacgcacgccagaggttgcccgcagccgcgccaccccgttattggatttgatcatggcagcgttgacgccccatccaccgcaaaaacaggcgtatggtgtgacattacccacttcagtactgtttattgccggacacgatactaatctggcaaatctcggcggcgcactggagctcaactggacgcttcccggtcagccggataacacgccgccaggtggtgaactggtgtttgaacgctggcgtcggctaagcgataacagccagtggattcaggtttcgctggtcttccagactttacagcagatgcgtgataaaacgccgctgtcattaaatacgccgcccggagaggtgaaactgaccctggcaggatgtgaagagcgaaatgcgcagggcatgtgttcgttggcaggttttacgcaaatcgtgaatgaagcacgcataccggcgtgcagtttgtaatgcataaaaagagcattcagttacctgaatgctctgaggctgatgacaaacgaagaactgtctaatgcgtagaccggaaaaggcgttcacgccgcatccggccactttcagttttactctttctcggagtaactataaccgtaatagttatagccgtaactgtaagcggtgctggcgcgtttaatcacaccattgaggatagcgcctttaatattgacgcctgcctgttccagacgctgcattgacaaactcacctctttggcggtgttcaagccaaaacgcgcaaccagcaggctggtgccaacagaacgccccacgaccgcggcatcactcaccgccagcatcggcggcgtatcgacaatcaccagatcgtaatggtcgttcgcccattccagtaattgacgcatccgatcgcgcatcagcagttcagacgggttaggtggcacctgaccgcgagtaatcacatcaaagcctcctttgccaaaatgctggatcactttgttgagctcatctttacctgccagatattccgacaagccatgttcattactcacggtaaacaggttatgcgaataaccacggcgtaagtcggcatcaataaataacactttttgatcggactgggcgatcaccgctgccagagttgaactgacaaacgttttaccactgtctggcgtcgcaccggtgatcatcagaatgttattctccgtctccatcatagcgaaatgcagactggttcgtagcgcacgtacggcttccacagcagaatccgccgggttatccaccgccaggaaggggatatttttagtacgatggcgctgctgattagaaaataaatttttcttacgcagacgggtgcgtttatccagccactcggacattgggatagtggcataaacgctgatgccgtgctcttccagttgttccggggcttctacaccacgacgcaacatcgcacgcgccagcacggcacccacagaaataaacaggccaagaataaaaccaagcaccacattcaacgcttttttcggtttcactggctgcggctgagtgactgccgggtcgataatccgcacgttaccaatggcactggatttcgaaatactcaactcctgctggcggttaagtaattgcagatataccgcacggcccgcttctacgtcacgacttaaacgcaacacttcctgttgggtggaaggcattgccgatacccgcttattcaggcgtttgcgttcttgctccagcgtctggcgtttttccagcagcgcacgataagttgggtgatctttcttatacagctgggagatctctgcctcgcggaaggtcagctcattgagttgattatcaacgttcacaatctgctcaagaacggctttggcttccaggttaaggtcaaccgaatcgcgctgctggcgataaacgttgagtttttcttccgcctggtccagctcgctgcgcacttcaggtaactggcgctgtaagaattcaaggctttgtgaatcctgcgccgcctggcgagcgatattctgttgcaaatagttgttagcgatgctgttcagaatacgagtaatcaactggggatcatcaccagtcatggtaagttccagcatcccgctttctttactgcgttcgctaacggtaaaggtttcctgcaatgcgttaatcgcttccagttcggtacgctggctcaggacaaactgtgttcctggtttggccttaatgtccgcgatagtcagcgcaacgccatctttttccagacgctggccgaccataccattgacggtgaactcttcaccttccagtgtatagtggccgttttccccaaccgtgagtgtcagttgctgatcctgaccattcagttgtggaatatgcatccagctgatcgccagctcacctggtttttctttggttaatctcgcccagccgcgacccacaatcggaaaatacttctgctcaactatgtcgcgcagattcagttcagcaatggttttaccgagaatcatgcgcgattgcagcagttggatctccggtgcagactcgggcgatgagttagggatcatatcgctcaggccgctgagaatggcgttgccctgtttttgctcaacctggaccagagtatctgcctgataaattggtgtacttaacagcgagtaagcgacagcgatcagcgtgaataacgcggtcacgctgataataaacttacggtgatcccataactcgccgaccagacgaagcagatcgatctcattttcctgagtgctgcctggtggcgtattcatatttttagttgtcatcgtattttataaactcaaattaccggctgaggcgcttcgcccattcctgactggcgcgctccaacataccgtagacatgttcaaatgcgtcctgacttttacgatagggatccgggatctctttctgttccagccattgcccaaacagcattgtcttcccgcggacctcgggagcaattgcggtaacctgagcaatatgttccgactccattgccagaatcagatcgtaatttcgtgccatctcagcagtgagcttacgtccggcatgtccttcaagagatacgccatgattagcggcaacatctgccgctgtcgcatctgcagggtgttttaccagaccatgaacacctgccgatttgacttttacgcccggcagacgtttacgcagcaagcgctcgccaatgggcgaacggcaaatgttgccggtacaaaccaccaggattgagttaaattttagttgggccatgtttgaatccaccgtgaagtctctgtcaggtcatgcaccccggaaatcgtcggtaccagcagagaaatcacacggttccaacgagccagcggcgcggtagtgacataaacaatgtcgtaaggttcaagctggaattccgttccgagtatcattgccgatgcgtccttcgcattcagctgataaatattggcgattttgccattctgcttgttttgcgttgcacgaataacaaaaatccccgtcgcatcagcgacatcctgattcataccctcagcgttacccagcgcttccgccagggtcataccgctgcggtccattttcagcgtgctctgtttacccacttcacccatcacgaagactttcagatcatcgttgcgcggaataaataaaatatcgcccgggtgcagcagtttgttctggcgcaagtcgccacgctgcatcagcgcatagaggttcactttggtctttacgccattctgggtgagcaccacgttgcgccagtctgcatctgcggtcagaccgcccgcggcgttaatcgcatccatgatggtcagaggaatattggtaatcggctgctgacccgatttgctgacttcgccggtgacgtacgctttttgcgatcggaacgccgcgacgctgacatcgacttgcgggctttcaatgactgaatcgagacgcgctgtaatctcgttgcgtacctgggtaagtgttttcccggccactttcaggcgaccaatataggggtagaaaatcgcaccatcggcgttaacccagttgccggtatcactggcgctacggtattgccctgcgggggtggttagttccgggtgatcccagaccgtaaccatcaacacatccccaatgccgatacgatattcatagtttgcgatttgctgctccagctccgggttagcctgcgacataatcggtttggcgcgcaactgatcaatcaatcctggcgtgacgggatagatattgaccattttgtccaggtcatactgattgtcaggtagttcaatgacatccttgttactggtcgataaattctgaccaggaacaagggtacatgctgtcaaagacagaacagccaatgtcagtaccgaaaacttaaaaatgttctttttcattggtttatatttatcagtcaatgtaatgttatgaattacgtcaggttattgtccaaccggtacttctcgctctgccgtcattggatagagctggtatttgcgtgacagcatttgtccaccatcacgcgtcaatggtgtccacgaaaccaccgcgcggttgcggttaggtccaatggtcatcaagtcgaatggaatcgagatataaaaacctttactaaagccgccttcgccgtagtcatctttagatacgttactgattgccgcccatacccctaccgccacgccgctgtcaaagcgtttggcgacgtcgatcgttgcgcctttatcttttgccagatattgcccaacgctaagtttcatcagtacgccattgggcgtcggcgggttccagtaagccgtcacgaaacctgttggcgtggaataatcggtgaaacgcatcatgttgtcccagtcacgctgcttcacgtagttaacgtccacacccagcgcccagctggcatctagcgggcgataaagcagctcggaaccgacaccggcatacatcgtttccagataaccgccatacacctggccatagaaaccattgcctaagtcagcaaaatagttcgcctgcaagttgttgagataaacgtcattgcgaacgtagtcacggatatgcgtgcgcacgcggggcagggtagagtccgcgggcaacagcgaagacttaaacttgtcgtagttgttgtaaatattggtgaaaataccgccatcaagcagcaggtggtcggtaaaccagtagcgggcactggacatcagccccagctggaacatatagaaatcttccgggccgcccagcgactgtgaaagtgttgggttgaaagagtagctaaagcgatcttcacgaatacggtagccccgaccaaaggcagaaagatcttctgcttcaacacgttgttgttgaagttgctctgattgaccaggcgctgtaccagccagctgtttgcgcaggctggctacgtcggtttcggtagtcaccatcgccatatgctcgcgcttttgcgtcacgctaatcttctcaacgccttgcggcaggttattcaccagaatccggttggcacgatcgaccgcttcgcgagaatcacggtatttgtattgttgaccagacatatacagcgtcttatcgcgcagctgaatttccggtgcttcaaaacctgcgttgtacttcagcgcggtaagttggttcgctactgtggtgtactgcaatccttcagattcaggcgcaggttgatatgccggttttggcgtatcgcgcagggcagggcgcagatcgttgaaattggtccgtaacgtgaagccaaacatcaacgtgttaccgcgttcataactcaggttgagatctgcccagctggcagcgcgataaactgcgccgacgttgaaatggcttgcctgaggcagtttgccagcgaaatcattctggtaattgttgccatcgtattcgagtttcagacgcaggggattccacggcgtttgatactcaatgccgccaaagatggaagccgggccacgaaagatatcgctaaagctgatatcgcccgcatcgtgagactctgcgcgatgacaatatttatcgctcacccggcaaaacgggttggtaatattgcccgcattaccggcgtagccccatgccatcccgagggtgaaatcaaatggccccgcttgcttgctggccaccagatactcaccgtcaaacagacccgtaccagcaatatcacgtttaccaaacgccacttgcggtagccagtaaccttcttcccacaggcgaagtttaaaatcgaatgatttgtctttgtatgactgatcgccgctgaaatcttcccactggctatatttgcgtgtgcgcacatccgtataacgaatggtgccttccagccatgggaacagcgccacggaggtggagtagaaccggtattgatcgttatcccggtagttgacgctgaattcaccttccggtgcgatgcgcgcatttggcatctgcaacaatcctgtgccgccaaagtctgattgcgacgaacccagcggatccgggtaggttaatacttcagcatgacaggcactggagacggcaatggccaggcagcttaaaagataagaattcttcttcatcagtcaggaacacgttgcgttaaaacagacacaatctggtcatttaaatcagcatatttttcgggcagtacatgcgcagaaaagcccaaccaaagctggctgccaggcggtggttccacatgtcttttattccacagggcaacaggggcgacgacagtctcaccctcaggcgtaatcaccataacgttattcttgtccgcgcctgcaaggcgggggtgatcttgcagataatcggtaacgctacggcctgcctgccagggcaattgcccggccccagaaaccgcacccagcagagtaatagtcaccggacgctgtacggtatagagcgtatagtccccgaccaacgggggattgctgttctcatccaatcgtacaaaatcagggtccagtttgaccggtaagcgaccagtgatattgagattgagtaactgctggcgcacggatttaatcgttgccgccacatcgtcgtcagcttctgcttcccaggaagcaagctgtgccatgacatgttggtagtctttaagcgctttagctttcgccgcagagtcggtcagcaaggcaccaggccaccagaggcgatcgcgcagttgcggttgtgtcaccaactggacaacattttccatggggccaacggaaagtgtctgttgttcgccaggcagataaatagtcaccgttccttgcgcaaaggcatggggtgtcattacgtaaagtacgctggcaatgaaatacgactgtaatttattcatggtgcgggtttaagaaacgtcatttctacgggaataacccctgcgcctaacatttgccgactttgacgaacctggccagtagccgaatcgacccagaatgtgttttgccactgtttttctggccgcgtggaagtcacctcttcctgccagacattacacagcacattgcgacccgcaatattcagcgtctctaatccagcaaaggaaaaagtagaactcagggtcgcagagcgaaaatggttgtcttcactccagagaatatcgcgcgtccagcggctgccatcttttattgccagcgcgttacgcagagggtcctgcccggaatttatcacttccagcagattattattaagtttgacggtttttaaaagacgtccattgtgggtaaccagcatggcgttatcctgggataaccatttgctttgttcttgttctatatatcccagtaccacaaagattcgttgcccttcattaaggcgtaaatacatcgtggaataaggcaacgcctggatctgctgatccgctacggtgatatcctgattatcgaaaaggctggcgcgaaatgtatcgaccatactttgctggctgtgcgtacatcccgcaagaaatagtgcgaaaatcgataaaataagagggcgcacctttaatccttgaaaggttaattaaaaaaatgcaaatctctaaagcccggtacgaatatcgcaaccgggtatcatttaactttaatttcgacgcgttaaagcagtattagcgtgtagtggacgtggtggttgaggtgttatgagaaccgccatcgccactgtcatttgctgcaacaactgccaacgtcgccacaccaacagccgttgccacaccgacaactgtcgccgtgccgacagcgccagcagccacgccaccagtggtagtagcagtcgtggttgcgccggtagtggtcgttgtggtgccagtagtacccgtcgttgcctcggtcccgtttgttgcttcaggggcagcaaacgcagctggcgtcgtcaacatgaaggccataaggattgcagaaagcttgtgtttcataacttttcctttattcatcgcatggacaatacgtacgcttgagatcaggattgtctactttgagtataacatccttgtgaaatctccctttcctcataccgcttgcactatatactgcgggtaggaaaggcgcgcagagggaaatataagattgttaactatccccctctggaaatacgacttgtgagcataagataaatcttagcaaaatacaaattaaagataaggaaattgttacgaaagctattaattattgttggtaatatagtttcaagtggtactataactggctgttaaatggcatttataactattaggtgcagagatattcgcttaaatggattagtttctttgtggaaaagtaaccgatgttataatgtatgatgttgactattgcactattccaataaaaccagtcagctttaaacaagcagcgtcatattaagagagataaacatttgccgctgttggtcctcgcaggccatttacgcggcaaaattccacacgtaatcctggtataagcacttctgcgtcgcggggagtgaatgcagaaatatggacctgaacttctttacgaccgtcggaggggataatgaatcctttgccgcttttgcgatcaaaggttttgacaattcctgtcattttacgggacaaacaaattccttactgaaaatactgcgctgcactatacgctgttggtaatgactccaacttattgatagtgttttatgttcagataatgcccgatgactttgtcatgcagctccaccgattttgagaacgacagcgacttccgtcccagccgtgccaggtgctgcctcagattcaggttatgccgctcaattcgctgcgtatatcgcttgctgattacgtgcagctttcccttcaggcgggattcatacagcggccagccatccgtcatccatatcaccacgtcaaagggtgacagcaggctcataagacgccccagcgtcgccatcgtgcgttcaccgaatacgtgcgcaacaaccgtcttccggagcctgtcatacgcgtaaaacagccagcgctggcgcgatttagccccgacgtatccccactgttcgtccatttccgcgcagacgatgacgtcactgcccggctgtatgcgcgaggttaccgactgcggcctgagttttttaagtgacgtaaaatcgtgttgaggccaacgcccataatgcgggcagtagcccggcatccaacgccattcatggccatatcaatgattttctggtgcgtaccgggttgagaagcggtgtaagtgaactgcagttgccatgttttacggcagtgagagcagagatagcgctgatgtccggcggtgcttttgccgttacgcaccaccccgtcagtagctgaacaggagggacagctgatagaaacagaagccactggagcacctcaaaaacaccatcatacactaaatcagtaagttggcagcatcacctaacggggttaataaaataaagccagcgatatttaagaccgccggacggctaaaataaaatttgcttaatctcaattatcatgccttaatagctgcgtcggtttgaaagacagacagcatacaaagtagtttactaaagcagttctcattatcaggcattatccccttcttttgagtctctctcctgaacactaagtagtttctgtattaaagccctgtttgccgaaaggcccaaaatgaaggaagtaaaatatgtctaataaaatgactggtttagtaaaatggtttaacgcagataaaggttttggctttatcactcctgatgatggcagcaaagacgttttcgtccatttcaccgccatccagagcaatgaattccgcacgctgaacgaaaatcagaaagttgaattttctattgagcaggggcaacgtggccccgcggcagcgaacgttgttacgctctaaggttgccgttattactcaacatctccatttccgctgtccatgttgtcatggttcacagtaccgtacatcggcattcgatgtgacggagcgaaaccctttgggcgctaagtgtattttttgtaaatcgacgatgatcacctttgataacgtcgcgctgcaaatacgcactgaccatgcgccgctggatttcacaaaataatatcaggctccctcgtggagccttttttatatctgccttatttttcttcaacgctgtatgtatagtaagcgataacctgttgattattgaatctttcggggagatggcttataacatttcttacctgaccagggtaccgggaaccaacaccttactggcgtgttgctgtctttcaagaccagacgaggttaacagtgaatattgaagagttaaaaaaacaagccgaaacggaaatcgctgactttatcgcgcaaaaaatcgccgagctgaacaagaatacagggaaagaagtctctgaaattcgcttcaccgcacgagaaaaaatgaccgggcttgaaagttatgatgtcaaaatcaaaataatgtgattttgtgaacatcaccccgtgcgaggtgatgttccgcttgttgctaatttagtgaccaatcattggcgcttgtggaattaagcgtcggtacaattcctccggcaccgggctttgccatactcccgcatacattgcgtaaccaatcaccgcgaacataatccccataaccagtagcgtcattaaccagccagacaacgcaaaagcttttttatttgccgcaggtttttgcagtgaaaaggtcaatgttgaggctaccggacatgactctacgcaagtcatacagccggtacattccactgttcgtacctgaattaatttatctaccgggatccgtgatgggcaattttttgcgcatttgccacagtcgatacaactttcggcattgcgacgaatcttaaacggcgacaatagcgaaaccacgcccatcagcgcgccatatgggcaaagataacgacaccaggcatggcgaataaacaggctggcaatcagcaaaacggtcacgctgattaatgtcgcggtccccatatgacgaaagaaatcgagcatttttacgtccatcaccacgctgtagggcgacaacataaaatagtgaatcgcctgagcgggcatcaataacgcgatatagagaaaaaaactcaacagcaaatacttcacgccgcgcagaggaatatccagccagcggggaaggacacattgccgaccaaacagtttgttaccgagatcgccgattaattcagaaagcgtaccaaccgggcataaccatgagcaaaaggcctttttgagtaatagactgatgacgataaaagcgaccaataacagcatcgcggcggcgtggacggacggtaactgacctgttgtaaggctatatttcagattcatcagaccggcaatcggtagccagccttcgatacctcccggtctggcgacaaatgtcgtgctacttgccgtttcgtaatagcgcacccaataccagaaagtgatggcaatataaatattaattgccaacagtaataattgcgtcgctttacgccaggtcgtggcattgcgccagtcattccacggtaatttgccgcccgtcgtgcctggccgccgctgccagcgggttctttttttctctgccatgattttgccagtccgttaagttgcatacaaaatgccactattctagttgttcttaacaggctgatattgattcaaatcgcgttcaggtctttcttatgcaaccatgcttccagagcggcaacactgcgtgtaatttcttcgtgtggaaggggggcagataatggctgctgctccagttgtgcgcatagctggctggcgatacgcattcccaaactcgagcaactgctttttagctgatgcgcggcacgctttattttctcgctatcctgactggcgcgggcaatgtcgatttcatcgagaagcggcagggcatgttgtgtaaataataccagccattcgtggatcttctccgtccccattaactgagcatcttcattgagttgcgatacatccagcgattgatcgttattgacttgcagttggagatagtgcgccagtaactgaccgagcacttcacgcggcaccggtttagggataatcccgcggaataatgaactggtacgctggcgcagcgtttcgtcaatgacatgggcgctaaagccaatcaaaaccagcgacggatattgctgtgccagttgtcgggcaagcgtaatgccgtcgacatccggcagatcaaaatccaccagtgaggcagcaaacggttcgctattttgcagtgtctctaaagcctgcgcggcattgccaacagcaacaacctgcgcaccactggtgttcagcatctcaacggtaattcgctgggttagcgggttatcttcaattaacagcaaacgtaaaccgtcaagacgcatcgcctgattgactgtttttggcacgggtgccgtggcaacacgtaacggcaagcgtaaacaaaaacagcttccaacctccggcgtgctggtggcgctcagttcgccgcccatcgcctgggccagacggctactgatagtcagtcccagcccggtgccgccgcgtttgccgcttacctgcacaaatggctggaagatttctgccagtttcgcgggatcaataccgcagccgctgtcttccacttcgaccagccattgctcgccatcagtgcgactacgcaggataatgtacccttcgtcagtaaaacgcagggcgttgctcaacaggttggttataacctgacgaatacgtcgcggatcgcccattaacgcgctcggtacatcatcggcaattgccgttgccaggcgaatcgggcgacctttcacccgtccgctcattaattgcagggtactttccagcagcgggcgcggttcaaagggctcatcgctgaccgaaacattcttgccacctgcttcgatagcggaataatcgagaatatcgttgaggatggtcagcaacgattcaccagagtcagtaattgcccgcaaatcatcacgctgggcgttaagtgtggggttatctgccagtagctgtgcggtgccgagaataccgtacagcggtgtgcggatctcatggctcatcgccgccagaaacgccgattttgcctggctggctttttctgcttccgcccgtgcctgtcggtgttctatcaccagttcctgcaattcagctgtacgcgctttgacctgcgccgccagctgttcgcggtggcgattcagtgcatgaacattgctgcgaaacgcatccatcagccgcccgatggtatccagctcccgtacgccagcggtttccgggaaaggggagtcaatatcaccgtccagcagccgttgcagcgcctgcgtttgttcggcaagtggacgcgtgactgagcgataaaccacgcgccaaaggatcagaatcagtgcgcaaagtgaaaccatccccagcaataacaggctgtattgcccgcgtgcactggctttttccagatgcgccagtccgtgctgattacgcagctcaatggtgtcgaccagctgactgacttcgctactaaactgcgcgaactgggcgatgttattttgtgcgagagtttgtaggtgattgctgatttcactgtcctgctgatacagcgccagcaaatcgctatattggctaacggtagttaacgttgttgcgacctgcgcacgaacacccggatcttcaatgcgtatttgccgacgttgcagaattttcaccgcattattgagctgcttttccagcgttggtgcatttttctggatctgctccagccccagattcatcaccatttgctgcacccgcagagcgctaaggcgcagttcattcatctggttaacatactcaagatcgatatcaatcagccgatcgagtgcactttcagcagcctgacgctgatcttgttcgatcaaatcgtaaatcccggcctgggtcgctccagcggaagttgtcgcattattcgcctgaccttgcgccaggcgtgcgatctcatcggcggcagcgactatctgctgactgagttgccgttgttgctggcgtagttgcagacgccgccccaccagttccccttgctgacgtaatgaacgggagatctcctgctcctgttgttcaatagcggtggtatcaaaaccttgttcccgtaacgcttgcagcaacgcattaatcttcaggctttgtgcggtgagcattcgcccctgcgcctgccacatcttttcgttatcggcactggtcaggttctgcgcggcgaaaagttcccaggcgctggcttcgctcaactggcgcgccatattcatggtaggaatcaatgcctgagtgttgtctttttccacctggctgataaagcgcaggttgtaccatcccaccagggtactggtcagggttaacagcgccatcagggcaaagcccatccagagtcttcgggtcagggttaaattcacggtcggtgcacttaaggtgaaaaaggttgagtcgcaaagcggaatgcatctagcataaagccttattattgatgaggctataatgcgcgtactgctatttttacttctttcccttttcatgttgccggcattttcggctgataacctgttgcgctggcatgatgcgcagcatttcacggtgcaagcctctatgccgcttaaagccaaacgcgcatggaaactgtgcgcgctttatcccagcctgaaagattcatactggttatcgttgaactatggtatgcaggaggcagctcgccgctatggtgtggatttaaaagtgctggaggcaggcggctacagccagttggctacccagcaagcacaaatcgaccagtgtaaacagtggggcgcagaggccattttactcggtagtagcacgacctcatttcccgatctgcaaaagcaggtagcaagtctgccggtgatcgaactggtaaatgctattgatgctccccaggtgaaaagccgcgttggtgtaccctggtttcagatgggctatcaacctgggcgatatttggtgcaatgggcgcacggtaaaccactgaacgtgctgttgatgcccggacccgataatgccgggggcagtaaagagatggtcgagggttttcgcgcagccattgccggaagcccggtgcgtattgttgatattgcgcttggtgataacgatattgaaatccagcgtaacctgttgcaggagatgctggaacgccacccagaaatcgacgtcgttgccggaacggccattgcggcagaggcggcaatgggtgaagggcgtaacctgaaaacgccgcttaccgtggtgtcgttttatctttcacatcaggtgtatcgcgggctgaagcggggaagagtgattatggctgccagcgatcaaatggtctggcagggggaactggcagttgagcaggccatcaggcaattacaggggcaatcggtgtctgataatgtcagcccaccgattttagttctgacgccgaaaaatgccgaccgagaacatatccgccgctcgctgtcaccagggggatttcgtccggtctatttttatcagcacacatcagcggctaagaaataaccttcaccatgttgcgtcaccagtaaatccgcgctgagtttatgacgtaaacgacgaattaacacatcgacggtgcgcaggtcagggttttccacccgacgcgcagaaagcatacgtagcagacgttcacggctgagaatttcgcccggattcgtcacaaatgccaccaacatttcatactctgcgcgggtcagtttaatcggctcgccatcccgctccagcgtatggcgcgacacattcaggcaataaccggcaaagcgatagcagttgtcctgagtgtgcggttgagcttgtcgcgcgaggtcgattcgccagagcagatttttcacccgtactaccagttcgcgcagttccagcggtttggtgacgtaatcgtctgcgcccatttccagcccaacaatacggtcaatccgatcgctgcgtccggtaaccagaataatccccaccgttgagcgttctcgcagggcgcgggttaacatcaggccattttcatcgggtaagttgatatccagcagaattaaatctaccggctgattctgcataatttcccgcagcccggcaccgctcgctgtaacggaaacggtatacccctcctgagtgaagtaagattgtaatcgcgcctgggtaaccggctcatcttcaacaataacaatgtgatgtggcatcagagggttttactcattctgttcatatctgttcatattctgccgtaagccgttcatcctgaccagtgccgctgttcatatttgctcattaagatcgcttcactaaaccataattttacaggggctattatgcggaaactctggaacgcgctacgccgacccagtgctcgttggtcggtactggcgctggtcgcaattgggattgtgattggcattgcgctgattgtattgccacacgttgggatcaaagtcaccagcacaaccgaattttgtgtcagttgccacagtatgcaaccggtgtatgaagaatataaacagtcggtgcatttccagaacgcctccggcgtgcgagctgaatgccatgactgtcatatcccgccggatattccaggcatggtgaagcgcaaactggaagcgagcaatgatatctaccagacctttattgctcactccattgatacacctgaaaaattcgaagccaaacgcgcggaacttgccgagcgtgaatgggcgcgaatgaaagaaaacaactcggcaacctgccgctcctgccataactacgatgcgatggatcatgcgaagcagcatcctgaagcggcacgtcagatgaaggtggcagcgaaagataatcaatcctgcatcgactgtcataaaggtattgcccaccagttaccggatatgagtagcggcttccgtaagcagttcgatgagctgcgcgccagtgctaatgacagtggtgacacgctgtactctattgatattaagccaatttatgcggcgaaaggcgataaagaagcctctggttctctgctgcctgcttcggaagtgaaagtccttaaacgtgacggcgactggctgcaaattgaaattaccggctggacggaaagcgccggacgtcagcgtgtactcacccaattcccaggtaaacgcatctttgttgcctcgattcgtggtgatgtgcagcagcaggtaaaaacgctggagaaaaccaccgttgccgacaccaataccgagtggagcaagttgcaggccactgcgtggatgaagaaaggcgacatggtgaacgatatcaaaccgatctgggcttatgcggattcgttgtacaacggcacctgtaaccagtgccacggcgcaccggaaatcgcccactttgacgctaacggttggatcggcacgctcaacggcatgattggctttaccagtctcgataaacgtgaagaacgcaccttgttgaaatatctgcaaatgaatgcgtctgacaccgcaggtaaggctcacggcgataagaaggaagaaaaataatgaacaataacgatctctttcaggcatcacgtcggcgttttctggcacaactcggcggcttaaccgtcgccgggatgctggggccgtcattgttaacgccgcgccgtgcgactgcggcgcaagcggcgactgacgctgtcatctcgaaagagggcattcttaccgggtcgcactggggggctatccgcgcgacggtgaaggatggtcgctttgtggcggcaaaaccgttcgaactggataaatatccgtcgaaaatgattgccggattgccggatcacgtacacaacgcggcgcgtattcgttatccgatggtacgcgtggactggctgcgtaagcgccatctcagcgatacctcccagcgcggtgataaccgttttgtgcgcgtgagctgggatgaagccctcgacatgttctatgaagaactggaacgcgtgcagaaaactcacgggccgagtgccttgctgaccgccagtggttggcaatcgacggggatgttccataacgcttcggggatgctggcgaaagctattgccttgcatggtaatagcgttggtacgggcggagattactctaccggtgctgcgcaggtgatcctgccgcgcgtggttggctcaatggaagtgtatgaacagcaaacctcctggccgctggtattgcagaacagcaaaaccattgtgctgtggggctctgatttgctgaaaaaccagcaagcgaactggtggtgcccggatcacgatgtttatgaatattacgcgcagctaaaagcgaaagtcgccgccggtgaaattgaggtcatcagcatcgatccggttgtcacatccacccatgagtatctggggcgcgagcatgtgaagcacattgcggttaacccgcaaactgatgtgccgctgcaactggcgctggcgtatacgctgtacagtgaaaacctgtacgacaaaaacttcctcgctaactactgtgtgggttttgagcagttcctgccgtacctgctgggtgagaaagacggtcagccgaaagatgccgcatgggctgaaaaactgaccggcattgatgccgaaaccattcgtgggctggcgcggcagatggcggcgaacagaacgcaaattattgctggctggtgcgtgcagcgtatgcagcacggtgaacagtgggcgtggatgattgtggttctggcggcgatgctggggcaaattggcctgccaggtggtggttttggttttggctggcactacaacggcgcaggcacgccggggcgtaaaggcgttattctgagtggtttctccggctctacgtcgattccgcctgttcacgacaacagtgactacaaaggctacagcagcactattccgattgcccgttttatcgatgcgatcctcgaaccggggaaagtgatcaactggaacggtaaatcggtaaaactgccgccgctgaaaatgtgtatttttgccggaactaacccattccatcgccatcagcagatcaaccgcattattgaaggctggcgcaagctggaaacggttatcgccatagataaccagtggacctcaacctgccgctttgccgatatcgtgctgcctgcgaccacgcagtttgagcgtaacgatctcgaccagtacggcaaccactccaaccgtggcattatcgccatgaaacaggtggtgccgccgcagttcgaggcgcgcaacgactttgatattttccgcgagctgtgccgtcgctttaatcgcgaagaagcctttaccgaagggctggacgaaatgggctggctgaaacgcatctggcaggaaggtgtacaacaaggcaaaggacgcggcgttcatctgccagcgtttgatgacttctggaataacaaagagtacgtcgagtttgaccatccgcagatgtttgttcgccaccaggcattccgcgaagatccggatctcgaaccgctgggcacgccgagtggcctgattgagatctactcgaaaaccatcgccgatatgaactacgacgattgtcaggggcatccgatgtggtttgagaaaatcgaacgctcccacggtgggcccggctcgcagaagtatccgttgcatctgcaatctgtgcatccggatttccgacttcactcgcagttatgtgagtcggaaactctgcgtcagcaatatacggtagcgggtaaagagccagtgttcattaacccgcaggatgccagcgcgcgcggtattcgtaacggtgatgtggtacgcgtctttaacgctcgcggtcaggtgttggcaggggcagtagtttctgaccgctatgcacccggcgtggcacgaattcacgaaggggcatggtacgatccagataaaggcggcgagcctggtgcgctgtgcaaatacggtaaccccaacgtgctgaccatcgacatcggtacttcgcagctggcgcaggcgaccagtgcgcacactacgctggtggaaattgagaagtacaatggagcagtggagcaggtgacggcgtttaacggccctgtggagatggtggcgcagtgcgaatatgttcccgcgtcgcaggtgaaatcatgaccacgctgacagcacaacagattgcctgtgtttacgcctggctggcgcagttgttctcccgtgaactggacgatgaacaactgacgcaaatcgccagtgcgcagatggctgaatggttttcgttgctgaaaagcgaaccgccgctggctgcggcggtgaatgagctggaaaactgtattgccacgctgacagtacgtgacgatgcccgtctggaactggccgctgacttttgcggcctgtttctgatgaccgacaaacaagcggcgctgccgtatgcatcggcctacaaacaggacgagcaagagattaaacgcttgttagttgaggcagggatggaaaccagcggcaatttcaacgaaccggcagatcatctggcgatctatctcgaattgctcagccatctgcatttttcgctgggagaggggaccgttcctgcgcgaagaatcgacagtttgcggcaaaaaacactgacggcgctgtggcaatggttaccagagtttgttgtgcgttgtcgtcagtatgacagctttggtttttacgcggcactaagccagttattgctggtgttagtggagagcgaccaccaaaacagataacgtcgtttgtgcgcctgaaaagacgcgtttagcgtcgcatcaggcattatggggcagttgccggatgcgtcatcacatccggcaaacacacatcacggatgagctacaaaccgggaaagtcgctggcgcagcaggcggttttcctgcttcaggtgcgcaatatcatccattaacgtcagcgccaccgcgatcccaggccagtccagagccagttcatgacgcaggcgtactgcgcgttgcaccacgatggcggcatggtcgtcaaatacccaggttgtttcctggatctcacgcggttcaaccacccccaaaccgacaatttcattcaactcctcttcagagatgccggtatgcaggcaaaattcggtaatagtaaaagtcaccgtaacattagccattatgctttcccccaatctttacgtggatcaaaagacgactgggcgtctgccagttgctgccacagcgcggcagtgttttcatccggtttcggcggcatcacgattttcagtaccgcatacagatcgccggtctgttttttgctcaccagacctttgcctttaacgcgcaatcgttgcccggcctggctgcctggcgggatagtcagcaaaatgctttctttcagtgttggaacggtgactttagcacccagcgccgcttcccacgggctaaccggcaccacaatttccagatcctggccgacaatatcgaacagcggatgtggcgcaatatgaatcaccagccacaaatcgccatttggaccgccgttttcgcccggcgtcccctggcctttcagacggatgcgttgaccattgccgacgcccgccgggatcttcacattcagcgttttcggaatttcctgttcgatcatgccaaaggcgttataaaccggcaggttatagctgatggtacgcttatgctcagtaagcgtttcttcgaggaataccgccacttcgatttcaatatcgtggccgcgtgtggcggggcgttgacggctctggcgggcatgctgaccgaaaattgacgagaagatatcgtcaaaatcttcggcgttaaaactctgaccgtcgctatgatggaactgacggttaaattgcggatcgttgcgatgttgccacatctgatcatactcagcgcgacgttgttcatcacttaacacttcccaggcttcagcgacctctttgaagcgggcttcggcatccggttctttgctgacatcaggatggtatttgcgggccagtcgacgataggcggtcttgattgtcttgagatcgtccgtcggtttcacgcccatgatggcgtaataatcctttaattccatagcgttatctcgcgtaaatcaacacaaattgaaggaacccctgtaaggtaactcctataagtgtagggtaatcctcaaaatttcatatgccaacacagaatatgttattgaaatcatcgcggagaggaggtcgcctcaaggtggggtgctgaacatattttaaacaggtgaaaaagggtgagcgatttttgatagtggaaccaggcactttaagtttaactggggcgtcattatttattaaattttataggcgctatatatgagtagtaatatacatggaattagttgcactgcaaataattatttgaaacaagcctggaacaatataaaaaatgagcacgaaaaaaaatcaaaaatattcaatcacgctttttgaaaacacactggtgtgttttatgcggttgtataaagaaatcagacgtcaaaaagctgaagactacattccatgcctggaatgcgattcactagaaaaagaatttgaggaaatgcagaatgataatgatttatcattatttttgagaacattgcgtactaatgatacagaaacttattcaggggtttcagaaggtattacatatactatacaatatgttcgagatattgatattgttagagtgtccttgccgggcagaggttcagagtctatcacagattttaaaggttattattggtatggctttatggaatatattgaaaacattaatgcgtgtgatgatgttttttctgagtattgtttagatgatgaaaatatgagtatccagccagaatggataaatacgccgggaatatctgatttagatactggtattgatttgtctggtatatcttttattcagagtgaaattaataaaacttatggattaaaatacgctccagtagatggcgatggctattgtctgttaagggccatactggttttaaaagaacatgagtattcatgggcgctgggcagccataagacgcaaaagcaagtatacgaagagtttattaaaattgttgataaacaaacgatcgaggctcttgttgatacggcattcaatgatctcagggaagatgtaaagacattattcggcgttaatctacaatctgacaacaaaattcaggggcagggtggttttttatcatggagttttttgtcttttaaaaaagaatttattgatagttgcttgaatgacaaaaaatgcatactgcatttacccgaatttatatttaatgataacaaggtacgccttgttttagacaccgacccagagcagagggttaatgaggtgaaaaatttcctcactgctctttcagatagcatttgctcattatttattgttaatagtaatatggcatcaatctccttggggaatgaatccttttcaacagatgaagatcttgagtatggttatttaatgaacactggcaatcattatgacgtttacctccctcctgaactttttgctcaggcttacaagttaaacaataaggaaaggaatgcgcaactcgactatttaaatcgttatgcaatttactgacaagggcatgtgctaaaaaccattgttattagcctcacttctcttattattggtactattgcctctgtattagtaacgccgctgatatcctgtttagccacaggtgtaatcatcagcggtgtacgcgaggcaggggataagcagacatagcttgcatcaaaccttacctgtttttaaagatgaatataaaaacagccgctcaacaagctgttttgcgagcctgttcccggaaaaatgtcatatttctgtcacactctttagtgattgataacaaaagaggtgccaggaatgaacaaaacgctaatcgccgcagctgtggcagggatagttttaatcgcttcaaacgctcaggcacaaaccgtaccggaaggctatcagctacagcaagtgctcatgatgagccgccataacttacgtgcgccgctggcgaacaatggcagtgtgctggagcagtcgacgccgaataaatggccagaatgggacgtccccggtgggcaactcaccaccaaaggtggcgtgctcgaagtgtatatgggccattacatgcgtgaatggctggcacagcaggggatggtgaaatcgggggaatgcccgccgccggacaccgtttatgcctatgccaatagtctgcaacgtaccgttgcgaccgcacagttctttattaccggcgcattcccggggtgtgatattcctgtgcatcaccaggaaaaaatgggcactatggacccaacctttaacccggtgatcaccgatgattccgccgcattcagtgaacaggcggtggcggcaatggagaaagagctcagcaaactccagcttaccgacagctaccaactactggaaaaaatcgttaactataaagattcccctgcctgtaaagagaaacaacagtgttcgctggtggatggcaaaaatacctttagcgccaagtatcaacaagaaccaggtgtttccgggccgctgaaagtcggcaactcgctggtagatgcgtttactttgcaatattacgaaggttttccgatggatcaggtggcctggggagaaatcaaatctgaccagcagtggaaggtgttgtcgaagcttaaaaacggctaccaggacagcctgtttacctcaccggaagtggcgcgcaatgttgcgaaaccgctggtcagttatatcgacaaagctctggtcaccgatcgcaccagcgcaccgaaaattacagtgttggttgggcacgactccaacattgcctctctgttaacggcgctggatttcaaaccgtatcagttgcatgaccagaacgaacgcacgccgattggcggcaaaatcgttttccagcgttggcatgacagcaaagccaatcgcgatttgatgaaaattgaatatgtgtatcagagtgcggaacagttacgtaatgccgatgcgttaaccctgcaggcacctgctcagcgtgtgacgctggaattaagcggttgcccgatagatgccaacggtttctgcccaatggataagtttgatagcgtgttgaatgaggcggtgaaataacagaaaactcccccgcgagaagtgggggagtcgctggttaaacgtttttacgttcgatggtctgttcgccccaaaaaagcgaatctttatcggtcttagcaaaggctttgactaacacttcatcgctaccttcttcccaaatcttttccgccattttttcgtcgtacccggcgacttcgaaaatggcctcggctatttccggcgacgtattgcgcagagatgcccattcaccgacgtgatgagctttcgcttcttgagttggcatgcgtatcctcctgttgaagattagccgttaagtttaactgccagacctgcgacatattccccttgataacgagcaatagacagttcttcctggcttggctggcgtgagccgtcaccgcctgcgatggtggttgcgccgtacggcgtaccgccgcgaacctgtgaaacgtcaaataattcctgcgctgcgtagccaatggggacaattaccatgccgtgatgcgcaagggtcgtccaggttgaagtaatagtttgttcctgaccgccgccagtaccggtggaactaaagacgctcgccagttttccgtatagtgcgccggaagcccacaggccgcccgtctggtcgaggaaggtacgcatttgaccggacatgttgccaaagcgggtaggtgtaccaaaaataatggcgtcgtaatcggccagttcttgcggggttgcaaccggtgcagtttgcgttttaccgcctgctttttcaaataattgcggcggcatggtttccggtacacgcttaacgacaacttctgcgccatcgactttgcttgcaccctcagcgactgcgcgtgccatsgtttcaatatgtccgtacatggaataataaagcaccagaactttagccatttctaaccactcctcgtgttatctctattccgtagcgattcgctaccacttatttaaagataagacgtccttttcagagtgcaaatttcacaaccacttatttgatttataacaactttcacaagcacgtaattttgtcgcaaaatgacacatttttatctcatcgcgtttttttaatcataagagcggcttatggataattatttgagatgatatctattctcgctaagaagctgttgcaggatattaccaaacgcgggtctgcccgcgtcagttcactaagcttagtcccacgtagcgaaaatatggcagccgccatacgccgcgttaattctatgcaatatgatgtctatacccagacggaggtcagtaatggcaaaccatcgaggcggttccggcaattttgcagaagaccgcgaaagagcatcagaagcaggtaaaaaaggtggacagcacagcgggggtaatttcaagaatgacccgcagcgcgcatctgaagcaggtaaaaaaggtggcaagagcagtcacggcaaaagcgacaactagccgggctaatcaatgacgaatgcatttttttcttaggctcgtcaaaaagtcatcaccgccggtaatcccggcggttttctgtttatggctcctgatgaacaacttctggcggtggaacgtcaaccaactttctgcttaacaacgcattgagtaaaatcgcgccaaaggttgctgtaccaatccctcccaacgtaaaaccgcccagcgtgagagcaaaatcacccgcgcccagcactaaggttactgcgaccataatcaaattaccgttctggcttaaatcgacacggttttgtacccatatccttgcgcctgcgacggcaatcagcccgaacacaacaattgatgcaccaccaatcaccgcggccggaatggtatgaatcagcgcgccaaatttcggtgaaaagcccaacagcatggcgatgacggcagcagcgacaaacaccagcgtcgagtagacttttgtcacggccattacaccgatattctcggcgtaggtggttacgccgctgccaccgacagaaccagaaagcatcgtcgccagcccatcaccgacgaatgcccgccccatatacgggtccatattgcgtccggtcatcccggcgactgccttgagatgacctaagttttccgccaccagaatcaccgccacgggcgcaatcagcatcattgcctgaccattaaaagcaggagtggaaaaatgtggcagaccgaaccaggcagcatggctgacgagagtaaaatcgacggcttttcccagccctaaaacgttggtcatcacgccatacagcagacaggcgacaattaatcctacgagaatcaataaccgctggatcatgccacgggtaaacaccgccaccagcccaatacacagcaccgtcattaccgccatccagctatcaaaggccgaagccgatacacttttcactgcgataggcgctaagttcaggccaatcgccatcaccaccgcacccgtcaccaccggcggcatcagtcgttcaatccagcgcgtaccgattttcatcaccaccaggccaatgacggtataaaccagcccacaggcgataatcccgcccagcgcaatgctgatattcgggttaatgccctgaccgttaaagcccgtcgcggcgatcaccacgccgacaaaagccgcgctggagccgagataactggggacgcgcccgccggtaataaagaaaaacagtaacgtgccgatccccgacattaaaatggaaagattgggatccagccccatcagaatcggcattaacaccgtcgcgccaaacatcgccaccgcgtgttgaacgcccattactgccgtctgagcaaacggcaatcgttcatccggcgcgaccacgccgctctctgtagaggtcgattttaactgccagtgaggaaaaccgaacattgccatcagcagtctccttaaggaggttaacaagcagggcgcatcagcgcgtgataactgcgatcgaaccacaccagcccgtagggtgtggtgtgacgatgaatcgcttcgatggcgcaaaacagaatgtcgtgggtgccgacgctcaccacctggctgatacggcagtcaaacgaaaccagagcctcttccagttgcgggcatccggtcacacccgtctgccagcgggcggcggcaaagcggtgttccatgggcgttttgccgccaaaaagatttgaaagcggctcctgcccggcgctcagtgtatttacacacagcgttcgattttcattgaataccggccagacggacgccccacgattcaggcacaccagtaatgtgggcggcgtatcggtcacgctgcagacggcgctggcggtgaacccggcgcgcccggctggaccgtccgtggtgatgatattgaccgccgcgcccatacaggacatcgcatcgcgaaaggtttgttgatcaactatgttcatagtttgctccttacaacagcccgcaggcttcttcaaaggacagacgtggcaggcgcgcataaagtttgctgctatcgccatagccgatattaatcagcagattgctcttcagcgtgctgcctgcaaaaaagcgtcgtcaacgtattgacggtcaaaacccgacatcgggccggtatccagtcccagcgcacggcaagcgacgatcagataggccgcctgcatggagctgttgcgaaacgctgtttcttcggcaagttgtgggctggaggtaaaccaactgcgggcatcaccgtggggaaacagtagtggtaaccgttcataaaattcactgtcccaggcaacgatagcggtgacgggcgcggtcagggttttttgtagattgccgctggaaagcgccgggcgcagacgttcttttccttctacagtgcggataaacacgatccgtgccggagaacagttagctgatgtcggcccccatttcatcagggcataaagctcccgtaacgtctcatcgctgacgggtgtctcccgccagccgttgtgagtgcgggcatcggtgaacagggtgctaagcgcacctgggctaacggcttcgttcatagcaattccttacagggcggcttcgcggtgatgtaacaggctggcaagcccgttgagtaaaagagcattaaacgtttcggggtcggtcacgttgcaggcgtgtccgccatagcgcatcaccattttctggctatcgggcagggcggcatgaagctcactggaacatgctgatggcaccagcagatcatcactggcgcagatgatttgcaccgggcagcggatgcgatccgcatggtgactaaagtcagcgcgtttgagggcgttaagtcgacgcagtaaattatttttgccctgaaaatgcgccagtgccagcgcgtcttctgcctcaaggcgaggtgcgcgggccgccatccagtcggcgggatagaggaacaacggctgcgcttccacccatgcctgcgcgccgccgctatacagtaatcgttcgcgaacctgaaaacagcggcgcgtatgggcgtttattcgtagccagccgttaacgctgatcagcacagttaccgacgcgggataatccagcgccagctgcattcccaccagcgcaccgagcgcatggccgaccaccgcgtaatgctcaatccctgcggctaccagcgcctgatgcagttccgctgccatctgggcgatactgtaatcttctgccagcgtgtcgggattattgccggtgccgcgctggtcgtaacagactacctgatactcctgctccagcaccgccagttgcggtaaccagtaactgccgctaccgccaagacccgaaatcaacaccactacgggcgcatcagcataagggggaggtgagagtgaaagtttcatcgcggcctcacttggcgatatgcgcaattgtggcgatttccaccagcgcgtcaggttttaccagtccgcactgaatgcagaatcgcgccggtttatcacccggaaaaaactcggcgtagatttcgttaatcgcggcgtaatttttccagtcggtaataaagatgctgttgaaggtcacatccgccatcgtgccacccgccgtctcgatcaccttgcggataatttccagaacgtggcgggtttgcgcctttgggtcatcggcaaacagcacgttattatgttgatcaaaagccagcgtaccggagacatacaccacgccatcagccagcgtgccgggaacgaagggggccagcggtgcgctgctgccagcgggaataattacggattttggcatcgttaaactccttaagcgatacgagcaaaggatgtgggagaaagcgcgtcgcagaacgtttcgacgtcgctgacccagccaaaaaaggtttcgatattgaacaacgcggctttctgtgcaaattccggccccgcctggtgtgttgcgtcttccagcaccacgccgaaatactccagaaaaaagccatcgcgtagcgtcgattcgacgcagacgttggtagcgataccggtgaaaaccagatggcgtattccacggctgcgcaaaatgctgtccagcggtgtattgaagaaaccgctgtagcgcggcttcggcagcacaatatcgccaggctgcggcaccagttcatccaccagttgataatcccaggagcctttcgccagcaatttcccctgcagctgcggctgcttacgcatggttttcagggcgttcgatttatgaaaattcggtgagccgggtccgccagcttcgacatactgttcatcccagccattttgaaaccagatgatcagcatccctgccgctcgcgctgcggtcacggcggtttgaatgttggcaatgaccgggcgagtggttgagacatcaaacccggcgagatctaagtagccgcctggcgtggcataagcgttttgcatatccaccacgatcagcgcactttgctgcggatcgaaggtaatggcttccggtcgagcggttaaggttgtcatcatgccacctcctgagtcagcgcaggtagatgggcgcggcactgcatcagtggttgaatgcgctcgccgaaggtttcgattcccgacagaaaatcatcgaaggtcaacagcacgccttcggcaccaggcacgcttgcgacttcatctaacatgcgcgcgacactggcgtaagaaccgactaacgtccccatattgatgtttaccgccgaagtgggatcggccatctgacggacgttggtatcagtaccggagcgggtatctttctgactttgttcggttagccagcttaacgcctcttcatccgcgcccgctttgtagtgttcccatttggcgcgagcggcatcgtcggtttcatcggcaatcaccataaacaacacataagaaccaacgtcgcgcccggtttgctctgcggcctgtttcatccgcgcagcggtcggggcgaaagccgtgggcgtatttacgcctttgccgaaacagaagttgaaatcggcatactgggcggagaacgccatgccagcgtcgctttgcccggcgcagatcactttcatggggacactcggttgcggactgacgcgacaatcattcatggtgaaaaaatcgcctttaaaatcgcttttccccgtgccccacaggtcgcgcagcacctgaacatattcggtgagatagtcgtaacgacgggagaaatagtcatcgccaggccagatacccatctgctcatactcgggcttttgccagccagtcacgaggttgacgccaaaacgcccgccagagatggagtcgatggttgcggccatacgggcgacgattgccggaggtaacgttaaggtggcagcagtggcgtaaatctgaatgcgcgaggtgacggccgccagccccgccatcaaggtgaacgactcaaggttgtgatcccagaactcagttttgccgccaaagccacgcagtttgatcatcgacagggcgaaatcgaaatggtagtgctccgctttttgcacaatggctttattcagttcaaaggtcggcatgtactgcggcgcgtgggtcgaaatgagccagccgttgttgccaataggtacgaatacgccaattttcatcatcaacctctcttcgtctcgtaaagtgaaagtcagacggggcgctgcatcctgcatatccttttcagccgcgtaatggcttgtttgcaaagcggatgccagtttttaaaaagtgaatgttattaatgtgttaacattgggttgtctaaaatatctggtaaaaagtggactaaacggtcaaaacagttgcacataaaacatgcatctgtgcgcgatgagagtgcagaaggtcgaggccgggcgggggttttgctatcctgttgccaatctacaagaggggagagcgcatgacgcaaggcgcagtgaaaacaacgggtaaacgttcgcgcgcagtaagcgcgaagaaaaaagcgattcttagcgcagcactggacactttttcacaattcggttttcacggcacaaggctggagcagatcgcagagttggcgggtgtttcaaaaaccaatctgctgtattactttccgtcaaaagaggcgctgtatattgccgtgctgcggcagattctcgatatctggctggcaccgttaaaagcgtttcgtgaagatttcgctccgctggcggcgataaaagagtacatccgtctgaagctggaagtctcccgcgattatccgcaggcttcgcgcctgttctgtatggagatgctggcaggcgcgccgctgttaatggatgaactgacgggcgatttgaaggcattaattgatgagaaatcggcgctgattgccggttgggtcaaaagcggcaaactcgcgccgattgatccgcagcatttgattttcatgatttgggcttccactcaacattacgccgatttcgcccctcaggtggaggcggtgacaggcgcgacgttgcgcgatgagatatttttcaatcaaacggttgaaaacgtgcagcggattattattgaggggattcgaccacgttaaagatgccggaggaggttgtaacatcctccggctacctgtttaacctatagtcattaaactggcgttaccgccagcggcagcggtattcacactcagcgaacgttcgatatacagccgttccagaaggatattgctttcgccacgggcaaaaccctgcaccgaaacaattgcgccatcccgcgcggcaacggcttcacacaatgcgcgaagctgatccgaatcaccgtggaagatcaccgcatcaaacggttgagcggttatattttccgctttcgccagttgaatacgttcgctgactgccgatggcaatgccttcactagctgacgatgcagcgcgtcatccggccacagtacctggctgcccaccgccagcacggcggcgagctgagtcagcgcatcctgctcatcatcggcaatacacaacacgcgctcacgcggcagcagcgtccaggtgttgcgttcacccgtcggccccggcagcaatcgttgtgttcctgcctgcgccagctcgccatattgcgtacataacgcctgcaattctggacgatttgctgcccattcccgcagtgcatttagcggctgagtcaatgcggctttcaactgtgcatcgaccggatactctgcatcctgacgcgcgagcgtcactgccagcgcactttccgggcgattcgccagcagacggtagagatagagcggaccgcctgctttcggcccggtaccggacaacccttcgccgccgaatggctgcacacccaccactgcgcccaccatattacggttaacatacaggttaccaacatgggccgagccagtgacctgggcgatggtttcatcaatacgcgtatggacaccaagcgtcagaccatagccggaagcgttaatctgctcgatcagctctggtagctggttacggttgtaacgcaccacatgcagcaccggaccaaagacctctttttgcaattcggcaaagtcatccagttcgatcagcgtcggggcgacaaaggtgccgctttgccattcacgggcatcttcgctgttttcccgcaccgcctggaacaccggacggcctttgctacgcatggtctgaatatggcgctcaatattggctttcgcttcgctatcaatcaccggaccgatatcggtggtcaggcgacccggattacccatccggcattcggccattgcaccgcgcagcattttcaacgtgtggtcggcaatctcatcttgcaggcacagcacgcgcagtgccgaacaacgctgacccgcactgtcgaacgccgaggccagcacatccacgacgacttgttcggtcagtgctgaagaatcgacaatcatcgcgttcatgccgccggtttcagcgatgagcggaatagggcgaccctgagcgtccaggcggctggcgatattgcgctgcagtaacgtagcgacttcggttgaaccggtaaacatcaccccgcgcacgcgatcatcacccgtcagttgcgcgcccacggtttccccctgacctggcagcaattgcaccacgccagggggtacacccgcttccagcaaaatggcgatcccttgcgcggcaatcagcggcgtttgttctgccggttttgccagcacgctgttacctgccgccagtgcggcagcgatctgcccggtgaaaatcgccagcgggaagttccacggactgatacacaccacaggccctaatggacggtgggtttcgttagcgaaatcatcccgcacctgtccggcatagtagtggagaaaatcgaccgcttcgcgcacttcggcaatggcgttactgaaggtttttccggcttcacgcaccagaataccaatcagttgctgcatctggctttccattagcacggcagcgcgatgcaaaatcgccgcgcgttcaaccggaggagtggcaaaccagattggcgcgttattaaccgcactttccagcgcctgttctacctcacgcggcgtggcttcacgcacaaagcccacaatatctttcggttccgcagggttaataacgggcgacatctcacctgccgctaccggttgttccagcattggcaaggcctgccatttttgcagtgcactattgagcagggcagaagagagcgaggccagccggtgttcgttagcgagatccagccctgccgagttgtcgcgcccgtgaccgtaaagatcgcgcggcaggggaattttcggatgcggtaatccagtttgcccttcctgttgcgccagtttttctacagcagtgaccggatcggcgaccagttcatccagtggcaaagaggtgtcggcaatacggttaacaaacgaggtgttagcaccgttttccagcaggcgacgcaccagatacgccaacagcgtttcatgggtaccgaccggagcataaatacgacacggacggttaagtttgccgtcggcaactttcccggtgacctgctcatacagtggctcgcccataccatgcaggcactggaactcgtactgacccggatagtagttctgacctgccagttgataaatcgctgccagcgtatgggcgttgtgcgtcgcgaactgcgggtagattagattcggcaccgccagcagctttttcgcacaggcgagatatgaaacgtcggtatacaccttgcgggtataaaccggatagccttcaaggccgtccatctgcgcacgcttgatttcactatcccagtacgcgcctttcaccaggcgaatcatcagacggcgacggctgcgggtggcgagatcaatcaggtaatcaatcaccagtgggcagcgtttttgataagcctgaataacaaaaccgataccgttccagcctgccagctcaggctcgaaacagagtttttccagcagatcgagggagatctccagacgatcggcctcttcggcgtcaatgttgataccaatatcgtactgacgcgccagcagggtgagtgatttcagacgtgggtaaagctcttccattacccggtcatactgggcgcggctgtaacgcggatgcagcgccgacagcttgattgaaatgcccggaccttcatagatgccacgaccattggacgctttaccaatggcgtgaatcgcctgctgataggaaaccatatacgcttgtgcatctgcggcagtcagtgcagcttcgccaagcatatcgtaagagtaacggaaacctttctcttccagcttgcgggcattggctaacgcttccgcgatggtttcgccagtgacgaactgctcgcccatcaggcgcatcgccatatccacacctttgcggatcagcggttcaccgcttttaccgataatgcggttcagcgagcgggagaggctggcttcgttatgggtggaaaccagtttgccagtaaacagcagcccccaggtggcggcattaacaaacaaagacgggctacgaccaatgtgtgattgccagttaccgttgctgattttgtcgcgaattaacgcatcacgggtggctttgtcgggaatacgcaacaacgcttccgccagacacatcagcgccacgccttcctgcgatgacaacgaaaactcctgcaataacccctgaaccatacctgcgcgaccactggcgtttttttgattacgcagtttatcggccagttgatacgccagtttgtgcgcctgttcagcaactggctgcggcaggcgggcttgttccagcagcatagaaaccgcttcggtttccgggcggcgataggccgctgtgatcgcggcgcgggaaaccgactggggcaaaatttgctcggcaaagtcgaggaatggctggtgtggttcctctgccggagtcggtgcttcatcgctctcattggcagcgccagaaagcagcgcaggtagctctggcagagtatcgctgttttccagttgttcgagataagaaaaaatcgcctgcttaattaaccagtgtggtgtgcgatcgatacgtgtcgcggcagacttaatacgctcacgcgtcgcgtcgtccagcttaacccccatggtggtggttcccatgccattactcctgttgttctgaaaggtgcaacttaacgttatcgtgaaatatccatgatgttgcaactttgtgcaaccatgttaaatgtgacctgcgtagcaagcttaaaaatgaatgaaatgttaataaaagaaatcgatatgacagggattaaaaaaataactcagactttttctctgcggcagttaacatttttgaaaggtgcaaccgcaaaaaatgtgagagagtgcaacctgatgaaaaatagtgtcgctgagcactaaaatttaatgtaaatggtgtgttaaatcgattgtgaataaccagcgcttccggcaggatacggtcgccctggtaaaacataaactctgttaccccgttccggtggcagatataacggcaagtttcgacattgccgataataattttttggagactttagatggctattagcacaccgatgttggtgacattttgtgtctatatctttggcatgatattgattgggtttatcgcctggcgatcaacgaaaaactttgacgactatattctgggcggtcgtagtcttgggccattcgtgacggcattatcggcgggtgcgtcggatatgagcggctggctgttaatggggttgccgggcgcggtttttctttccgggatttccgaaagctggatcgccattggcctgacattaggcgcgtggatcaactggaagctggtggccgggcggttgcgtgtgcataccgaatacaacaataacgccttaaccctgccggattatttcaccgggcgctttgaagataaaagccgcattttgcgcattatctccgcgctggttattttgctgttcttcaccatttattgcgcttcgggcattgtggcaggcgcgcgtctgtttgaaagtacctttggcatgagctacgaaacggctctgtgggcgggagctgcggcgacgatcctttacacctttattggcggtttcctcgcggtgagctggactgatactgtacaggccagcctgatgatttttgccctgatcctgacaccggttatcgtcattatcagtgtcggtggctttggtgactcgctggaagtgatcaaacaaaagagcatcgaaaacgttgatatgctcaaaggtctgaactttgttgccattatctcactgatgggttgggggctgggttacttcgggcagccgcacattctggcgcgttttatggcggcggattctcaccacagcattgtccatgcgcgtcgtatcagtatgacctggatgatcctctgcctggcaggggcggtggctgtcggcttctttgggattgcttactttaatgagcacccggcggtagcaggcgcggtaaaccagaacgccgagcgcgtgtttatcgaactggcgcaaattctgtttaacccgtggattgccgggattctgctgtcggcaattctggcggcggtaatgtcaacgttaagctgccagctgctggtgtgctccagtgcgattaccgaagatttatacaaagcgtttctgcgtaaacatgccagccagaaagagctggtgtgggtagggcgtgtgatggtgctggtggtggcgctggtggcgattgcgctggcggcaaacccggaaaaccgcgtgctgggcttagtgagctacgcgtgggcaggctttggcgcggcgtttggtccggtggtgctgttctcggtgatgtggtcacgcatgacgcgcaacggtgcgctggcggggatgatcatcggtgcgctgacggttatcgtctggaagcagttcggctggctgggactctacgaaattattccgggcttcatcttcggcagtatcgggattgtagtgtttagtttgctgggtaaagcgccgtcagcggcgatgcaaaaacgctttgccgaggccgatgcgcactatcattcggctccgccgtcacggttgcaggaaagctaagggacttagcctgcggcggttttgtttggcttcagcagcgggttgcgctcccttaatgtgcctcgccatataaattgaatggtgcagggagcgcgcagggggcggccaatcgccgccgccccctgctgtcccggccttcggggaacgcttcagcgattttgacgccaccaacacccgagctgttattatgttccgggcaaaaagttagatttgataatcgcggatggacgaaattgcttgatacacccgcttatcagttttacatggaagctctgatgcattgagtctggacagttttgtcggctggatacggcgtttacgcggcatccggcaagaacacatggctcgttgtaaacaatcccatctttgtacctggaataatcgtttatatcccctggcattacctctctttgtttacatttcaacatcattttataaacattccgcttgtatttttctttaccgtaatgataatcgctatcactgcgatttacttttctttgcatagattgactcagaaaaacgtttaagggtgggtggcatgtttgttccgtttctcattatgttgcgcgaaggacttgaagccgcgctgattgtcagtttgattgccagctatcttaagcgtacccagcgaggccgatggattggtgtgatgtggattggcgtgttgcttgccgctgcgttgtgcctgggcttggggatcttcattaacgaaaccaccggcgaatttccgcaaaaagagcaggaactgtttgaaggtatcgtggcggtgatcgccgtggtgatccttacctggatggttttctggatgcgcaaagtgtcgcgcaacgtcaaagtacaactggagcaggcagtcgatagcgcattgcagcgtggaaatcatcatggctgggcgctggtgatgatggtcttttttgccgttgcaagggaagggctggagtcggtctttttcctgctggcggcatttcaacaagatgtcgggatctggccgccgctgggtgcaatgctcggtcttgctactgccgtggtgctaggcttcctgctctactggggcggtattcgcctcaatcttggtgcattttttaaatggaccagcctgtttattctcttcgtcgccgcagggctggcagctggtgccattcgcgcatttcatgaagccggattgtggaaccactttcaggaaatcgccttcgatatgagtgcggtgctctcaactcactcgctgtttggcacgctgatggaagggatttttggctatcaggaagcgccgagcgtcagcgaagtcgccgtctggtttatttatctcatcccggcgctggtggcatttgctctgccaccacgcgcaggggcgacagcgtctcgctccgcgtaacaaatacgacgcaaactcttgcttagttacaacatactttaaagggatagtctcgtcatgaccattaacttccgccgtaacgcattgcagttgagcgtggctgcgctgttctcttctgcttttatggctaacgccgctaatgtgccgcaggtcaaggtgaccgtgaccgataagcagtgcgaaccgatgaccattacggttaacgccgggaaaacacagttcattattcagaaccacagccagaaggcgctggagtgggagatcctcaaaggcgtgatggtggtggaagagcgggaaaatatcgcccctggctttagccagaaaatgacggcgaatttacagcctggcgaatacgatatgacctgcggtctgctgactaacccgaaagggaagttgatcgtcaaaggtgaggcaacggcggatgcggcgcaaagtgatgcgctgttaagtcttggtggtgcaattactgcatataaagcgtatgtcatggcggaaaccacgcagctggtgaccgacacgaaagcctttactgacgctattaaagcaggcgatatcgaaaaagcgaaagcactgtatgcgccgacgcgccagcactatgagcgcatcgaaccgattgctgaactgttctccgatctggatggcagcattgacgcccgtgaagatgattacgagcaaaaagccgccgatccgaaattcaccggtttccaccgtctggaaaaagcattgtttggcgacaacaccaccaaaggcatggatcagtacgctgaccagctttataccgatgtggtcgatttgcaaaaacgcatcagtgaactggctttcccaccttcaaaagtggtcggcggtgcagccggactgattgaggaagtggcagccagcaaaatcagcggtgaagaagatcgctacagccacaccgatctgtgggatttccaggctaacgttgaaggctcgcagaaaattgtcgatctgctgcgtccacaactgcaaaaagccaacccggaactgttggcaaaagtcgatgccaactttaaaaaggtcgataccattctggcgaaataccgtactaaagacggttttgaaacctacgacaaattgaccgatgccgaccggaatgcactgaaaggaccgattactgcgctggcggaagatctggcgcaacttcgcggtgtgctgggattggattaagcattatgcagtatgaagataaaaacggcgtgaatgaaccgtcacgccgacgtttactgaaaggcattggtgcgctggcgctggcgggaagttgtccggtcgctcatgcacaaaaaacgcaaagtgcgccgggtacgctttcaccggatgcacgcaatgagaaacagccgttttatggtgagcatcaggcagggatcctgacgccacaacaggccgcaatgatgctggtggcgtttgatgtgcttgccagcgataaacccgatcttgaacggttgtttcgcttgttgactcagcgttttgcttttctgactcagggcggagcggcaccagaaacgccaaatccgcgcctgccaccactcgattccggcattcttggcggctacattgcgcccgataatctcaccatcacgttatcggtgggtcactcattgtttgatgagcgctttggccttgcgccacagatgccgaaaaagttgcagaagatgacgcgttttcccaacgactcgctggatgcggcgttatgtcatggtgatgtgttgctacaaatttgcgccaacacccaggacacggtgatccatgcgctgcgcgatatcatcaaacatacgccagatttgctcagcgtgcgctggaagcgggaagggtttatttccgatcacgcggcgcgtagtaaaggcaaagagacgccgattaatttgctgggtttcaaagacggcactgccaatcccgatagccagaatgataagttgatgcaaaaagtggtgtgggtaacggcagatcagcaggagccagcgtggacaatcggtggcagctatcaggcagtacgcttgattcagtttcgagtggaattttgggacagaactccgctgaaagaacagcagacgatttttggtcgtgataagcaaaccggtgcgccgctgggaatgcagcatgagcatgatgttcccgattacgccagcgatccggaagggaaggtgattgcgctggacagccatatccggctggcgaatccccgcacggcggagagtgagtccagcctgatgctgcgtcgtggctacagttattcactgggcgtcaccaactccgggcaactggatatggggctactgtttgtctgttaccaacacgatctggaaaaaggcttcctgactgtacaaaaaaggctcaatggcgaagcgctggaggaatacgttaaacctatcggcggcggttatttttttgcgctgccgggagtgaaggacgcgaacgattatctcggaagcgcgttattgcgggtttaatgtttatagacggataaggcgttcttgcgcagatgcctgatgcgatgcttgcgcgtcttcttatgcctacaatcggtgcgggttcggtaggcggataaggcgttcacgccgcatccggcgttcgtgcgcagatgcctgatgcgaatcctgctgaaagcacacagcttttttcatatctgtcatcactctgtcatctttccagtagaaactaatgtcactgaaatggtgttttatggttaaatataagtgaatatattgttgcaatgaatgcgagatctgttgtaattattaagtagcagcggaagttcccggcagtgatagtcagtcactatggagatcgcggatggtaacgtcctgttctggacaatgtcttgttaagctacgctccaccacttgcggagatttctcctccggtagcaacttcgtcactctgtatttttctcacttcctctctttactcgtgttaccgacgccgcaaacggtgtgcgtagccgtttttcggcattttatccaaaagcaaactatggcttacaaggaagccaaccctctgatgttcgtgcgcataatcgcgctgccaacggcgcgtgtgatgaatacaaacaactcaaggtgctctccatgggaagacaaaaagcagtgatcaaagctcgtcgtgaggcaaaacgtgtgctgagacgggattcgcgcagccataagcagcgtgaagaagaatcggtcacctcgcttgtgcagatgggcggcgtagaagccattggtatggcccgcgacagtcgcgatacttcgcccatcctcgcgcgaaatgaagcgcaattgcactatctgaaggctattgagagtaagcagctgatattcgccacgggcgaagccgggtgcggaaaaacctggatcagcgcagcaaaagcggcagaggccctgatacataaggatgtcgacaggattatcgtcacccgtccagttctgcaagccgatgaagatcttggcttcttacctggagatatcgcagaaaagtttgctccctattttcgcccggtctacgacgtgctggtccggcgcttaggggcttcctttatgcagtactgcctgcgaccggaaatagggaaggtggaaattgcgccgttcgcctatatgcgtggacgtacctttgaaaatgcagtcgtcattcttgacgaggcgcagaatgtgactgccgcgcaaatgaaaatgtttttaacccgcctcggggagaacgtgacggttatcgtcaacggtgatatcacgcaatgcgatttgcctcgcggcgtgtgctccggattaagtgacgcgctggaacgtttcgaagaagatgaaatggttgggatcgtccggttcggtaaagaggactgcgtacgttcggcactttgccaacgtacgctgcatgcatacagttaagtgtattatcggtgcagagcccgggcgaaccgggctttgttttgggtgtttatgcccggactagcgctttttctgaaacaaccatttttatttgcccctggctggtgaagtgtacgctcatcctatggcttttttgtagttgctgatagagctcatcaggtattgctaagctctctgcatattcttgcggcgtatattggtaggctgcatgatgctgctgtttttgaaaacgcagcttattgtacagcgcccagacaattaacacgacggcattcgccactgccagcaaaaaatagaactgaagtcggcttctggcctcgctttgccagtaataacccgtcagcagatccatggcgaataagaatatgaacaacgcaaataatgtccacaagatggttgtggcaacataatcaaccagtaaacgtactggtgattgtcgggtcgtaataattaaattgttcatattaacctctcagaatcccgcgatcgggacttacccaacgggcgcgttgctttttaggcatcaacatgactcgtgtaaatgataccaatgtcgttgccaggctcagcatccagaaaataaccgggaaccaaataatccagaaaagcgatgaagtcagattatgctcatagcgattctcgatcatcaggctgacaataaattgcagtaaacataacgtacacaataatattccggcagtatgtgtcgcagcgatatgtgtcaattcaatatttaacggtacaccggcaagttggactgcgtaaataatgaaaccgaccaggcaggtgaaggcccatattgtcgtcaggcagtattcaaaaaacagcggccacattcgaaagttttctttgcgccacaaccttgtcatatttttgaggaatacttctgcaccgccctgagcccagcgcaggcgctgtttccacagcccttttaacgtttcaggcattaatatccagcacagcgcccgtggctcgtaaaaaatcgtccactgattcaactgcagcttccagctaatatcaatatcttcggtgatcatatcgtcactccagtaacccacttctgccagggcgctgcgacgaaatgcggcaataacaccggaaacggtaaatacgtttccatagatacgctgggttcgcttgatcaaaccaataattgaggaatactcgccaacctgaattttacccaccagggtagaacgtgttcgaatacgaggattaccggttacggcacccacacgcgggttgtacaacatcggttccacaatatatgccgccgcatcgcggtctaataacgcatcgccatcaatgcacaccagatattcacttttcgccgcggcagctccggttttaagcgcaatggctttcccctggttttgcgccagatgaatgacccgcaaatggggaatttgtgcagccatgcgatccaggatggcacgggttttatctgttgaaccgtcatttacggcaataacttcaatgttctcataacgctgtgctaaagcggcgtgtatggtttcctcaacgtttttctcctcattaaaacagggaatgataatggagatagacggattatctttcaactggggagctggtgcgttttctccccacggccagtggcgttcacgatagacccagaaatagacgccgccaacaatccacataatggacataaaaaacggccagaagaaaacgaacctcatcatcagttcaccagagtgaaagtacgctacgcataggggtatgcataacaccagacataatataaaaaacgatacgatgcgattaatcatttttcggataccaggctgttgaaaactcaggacgaataaggtctatttcaggttggttatgcagaaaattgtcgggataataaccatagtttttcactccattcagttgtaataggctcatccagtgagcgagttgttgcgaagaaatagcctgatgctgaccatttttctgccagttttgtgcctgtaattctaaaatagatttgtctttagcctgagggatgtttttaatttgattggtcaattgtattaaccattggtcagccgatttttctgcgacaccttccagataaggcatagccataatagcggtccagtcatagctttttaggaaatcagcataattctgtgcaaaccaggcttcactttcaggttgtattaccggaagtgcaaaaatatttcgtgcagttttaatatgtggaccgcgaatggcttttacgcgcgcactaagttctaaagtgaagtcagttaacgcacgacttttaaagcgggcccactgtttaaattgctccgggttttgtcgaatttcgctcagactcccgctaaagcctgcttgctgataagccgtgatagccggtgcactggcatcttcataatctgaaagcaaagcatcatcgtggaacaatatgccatcaaaagcagcatgtccggcaagatcttcatataacatgccaacttgtgctctgactctgtcatcgaaaggagagagacggtgatattgttcaggatgaatttgtgcttttttctcccctgttggtaagtattttactcgcgttaatgtgggatctaaatcccagcttaataccggcatccacgcatagatgtttacacctgagcgggtacgtaattgccaggcaacccgactaaaaatatctgctttcattggtagcaaacgatttggaaaccagacctctttgaccagcccatcaccatcgggatcagcaaatgcctgcaaatacacggttgatatttgcatatctttcacccgctgaattagcacatcaatattgcgatccatttgctggaggttttcgtcataaacgtaatcaagatcgatatgcattatccgttgtggtgatttttcctgtacggtaataatttgctgggcaaactcttttaatgagggattattggcgattaatacccgcggaatggaatccaattgcgacgcatttgccaaacctgattcaagggtgaagaacatgtcataaccgagtttttttaattcctctatcgctatgccattcgcttcgccataaggccaaacaaaaacgtgtggatttacctcaacctttgtacgcaggtattccgtcatttttacagcatccagacgaattctttcccggtattctgctgcggtttcataccgtgcgtggtcagtaaaatatgcacgatttacatatacaggcaataagctgccggtggcattagcctgaataccgtagtgagaattccatgtatgagaagcgagctcaacgagccgggaacgcgcaacttctcgcacttgttgccacgtggcaaaatattctcgatcgaccaactcatcgccaaattttacttgtttatccgctggcgtatcgacccaactgccgacgggggcccatacagcaggccactggaaggcctgaagaattgggaagacgcgggtataaaaactctggtagccgtcatcaaaagtcagcactacagctttttccggtagcggttttcctcctcgatgtgcttcacgaatttgagcaatactgaccggttgataaccgttctcgcgcagccaggcaaattgttcacgcagtgctgatgtccgcactgacataaaacgctggtcggcagcttcgtcttcaacgttatgccatgaaatcgctacaaaaccattatgcggccacggttgctcggcgagtaaagattcgcgatcctgtggcggtataaatgatgttcttgactggctaatgcacgcggtgagcataattatactcaccagcatcaggagatatttatttccattacgtaacatatttatccttaaaatctgaatgtcatatcgaattcaacgtataagttgtgttctctgtcaccgtcataaggtcgtttttcccagcgtagcgttgcgccagcatcaatcacgtcattccagctaatgcgttgcccgtagccgagttgggtgacgacatccgtgccataatgtttttgccaggaggcaccaacacctgcgctgaatatttgctcccagctattttcatagcttcgccataacaaatggcttgcctcaaatgccggaacaatatcgaacgtttttatagggttgtagtatggggtatcgtgttctgtattttgttcgtaatacagactgggtaggaaatcgacaatcaaatatggtgaagaccagatgcgttcctgaccctcaagtgagacttcatgacgctggttactgtcggaaaaatcagtgaaagcccaggagacaccgtacttacgccgctcattttgataccagcgaacataagcctgagcactgttgcctgtaacaccatttttcattgcccgtaatggaacgcggtgagagaggcgttccagttgcgaaccaatacgccagttatcattaaaatcataccagccagacaggcgcgcgccgggtttatgctcatgattgaaaacgcgttcagcgtactctgcctcgagccagatattacgtgaccgccactcaacacccgcaagccagtcgcgaacaatcccttttacttcgctaaattgtccatcggcataaccgaatccagcaaaaccgcgccagttatccttcagcggtggtgaataaacgatggtggttaagtcgacatcatgtttaccactatccgggccttcggcatcaattcctgttgagccagcgatacgaagctctgcaagattatgtacatcaaccgcacgttttaatcgtacaacgccgggatcttgcggttcacgttcgacaacatcgtgcgttaagacagctgcctgctgccattcttgtaacgttaatgctgtccaggcttgttcaacctccagattaatattacgtggctcgatcacttctgctttttttaattcattttctgctgcacgaggccaaccgcgggcttgtaacacactcgcgtaatcaatgcgcagtccctgatttcctggtgcgttataagcaagctctctggctgtcatttcagcctgaggaagatcattactatattttgctacggttgagagaaacgaatgcccctgtaaccaggtatcattcgggatgctcgtaggcgtgcccattaaccgaaggaaaggcggcgaagtattaatggtatgttgggtgacagttagcgcgcccggataattttcactctccaggtggctgtaaaagagatccgcaagttcttcatcggataaatccggggcaatggtctccttgtgataaaagagctcggtcattattgactgtgctttttcggctgatgatctttgagataagccgatgcaacccaatattgcccccagggcggaataatttgccccgtcttttttaatcgctgatagtgagaaataacgtctttataacgatcgcgagttaataacgcgccaagatgatcaacctgaatacgctggtactgggcagtacggtctgggttatcgtgccacagaatttctaatgcagcgtattgggcgagggcgcgatcggcaatggcataacgttcactttcactgcgcgtaggcataaacgacagtctgaccagttcggcatgaatatcagcgcgaatatctggcgttaaattggcatcgtcaatcgcggcagcaagttgattattacgtaatgcctgcacgtattctgtgggatattgttgcgtagatgcattttcaggtaatgactctgtcatcgcccgtaattcatcctgatgacgccccgccagtttatagatataggcttctgcgagtaaattggctttgtccggtgctccagagttaagctgcttaagtttaaccagcgcagtatcatagtgaccagcatctgccagggttaaaatttgtccccgttgataatccttattttgcggctccagagagagcgccttttgccacagtgtaagcgagttttgccattgttgcaggttacgataagcgacggcgacagctgcataaccacgcgctggtaattgctgatgacggtagcggttgtaaacggtaataacctgtttatcttgcccggcccataaggcaatctgtaaccagtcagcaatttggttattgctgagtgctgattttagtgcaaaccatgacaaagctggctgagtattacccttgcgagcttcaataatcaatgcatcataggcgttattaacagcactcttcgccgcgggactcgctgctaaaaatgcggcagtaagaagtttcaaagcccatttggttttcgggcacctttttctgctacttgaatacatcctgtattactccatgtattgccaaaatctctctctgtatctaattacaggtaactgaaaagaaagatatttttgcacctcataatccgttattaaacgcggaagagagacgtgaattgttgatgatgagaagaagaaatgatgagcagagtgtccatataaaatccttttctcgcccgaaaatccattccaatgatgaggatcttcaggaatacggcataaatcccaatgcctttttcaaaataaattaggrtkawrmtryyaacttactgatttagtgtatgatggtgtttttgaggtgctccagtggcttctgtttctatcagctgtccctcctgttcagctactgacggggtggtgcgtaacggcaaaagcaccgccggacatcagcgctatctctgctctcactgccgtaaaacatggcaactgcagttcacttacaccgcttctcaacccggtacgcaccagaaaatcattgatatggccatgaatggcgttggatgccgggcaactgcccgcattatgggcgttggcctcaacacgattttacgtcacttwwaaaactcaggccgcagtcggtaacctcgcgcatacagccgggcagtgacgtcatcgtctgcgcggaaatggacgaacagtggggctatgtcggggctaaatcgcgccagcgctggctgttttacgcgtatgacaggctcggaagacggttgttgcgcacgtattcggtgaacgcactatggcgacgctggggcgtcttatgagcctgctgtcaccctttgacgtggtgatatggatgacggatggctggccgctgtatgaatcccgcctgaagggaaagctgcacgtaatcagcaagcgatatacgcagcgaattgagcggcataacctgaatctgaggcagcacctggcacggctgggacggaagtcgctgtcgttctcaaaatcggtggagctgcatgacaaagtcatcgggcattatctgaacataaaacactatcaataagttggagtcattaccccctctctgatggctgattttactggtgaaatgcatagactcatttctgaatatttgcagtgtaagcgacgtaaagatcaatctgttgagccccccc

SEQ ID NO: 520 - DNA, 112203 bp, Escherichia coli
atcagtaaattccgatgcatgatttcggatttttcgaaagtcctgatgaaaggctgcgctacggcactcacggatttaattgttattcctaatgtatctatgaattaatgttttataaggattttctataaccatttataagtattttcaagcctggcttgttgcaaacaatgtataaagcacttaggcaataataattacattcagcaactatcatcatcggtattgtttgtgggcggaatttcatattgacaacagtacagttcttatatctattaataatagaaagggatctacaacctacagattggtgtagctttatggaaaaagactatttgagaattagtagtactgtattagtgagcttattgtttgggcttgctttggttttggtgaatagttggtttaatcagccaggcgttgaggaagttgttccacgatcaacctatctgatggtaatgattgctttattttttatcgatgctgttgcatttatttttatgcagttgtatttcatttatgaccgtaggcaattttcaaactgtatacttagtttggcttttctgagttgtttgatttactttgttaaaaccgtcattatcattcagcaaattattgaggggcgtttgacaagcagtgttgtccaaaatgacattgcaatctattatttgtttcgtcagatgagtttgtgcatattaatatttctggcattggtgaataaagttagtgaaaacacaaaacagcgcaatttattttccaaaaaaatgactttgtgcataagtttgttttttgttttttgtttttggggggccgatagttgctcacatactttctagtcattatgagagctacaatttacacattgccgagttaaccaatgaaaatggtcaggtggtttggaaagcctcatatgttaccataatgattttcatgtggttaaccttgctttcggttaatctatactttaatggtttacgctatgatatctggaatggagtgacggtgattgctttttgtgccgtactgtacaatatctctctgttatttatgagtaggtatagcgtgtccacttggtatattagtcgcactattgaagtagtcagtaagttaactgttatggtaatatttatgtgccatatattcagtgcgctacgagtaacaaagaacattgcacatcgcgatcccttaaccaatatatttaacagaaattatttttttaatgaactgacagttcaatcagcatcagccaaaaaaacgccttattgcgtcatgattatggatatcgaccacttcaaaaaagtcaacgacacctgggggcatccggttggcgatcaggtgataaaaacagtggtgaatatcattgggaaaagcatacgaccagatgaccttttagcgcgcgtcggcggcgaagagtttggcgtcttgctgacggacatcgatactgaacgtgcgaaagctttagcggaaaggattcgggaaaatgttgagcgtttaactggcgataatcctgaatacgctataccacaaaaagtgacgattagtattggcgctgttgtgactcaggaaaatgcgttaaacccgaatgagatctatcgactggctgataacgcactttacgaggcgaaagagaccgggcgtaataaggtggttgtgagggatgtggtgaatttttgtgagtcaccataaagcggcattttgatcctacccacgtaatatggacacaggcctaagcgaggttcttgttttcaaattgttccggactgaggccgccacaccaactgtgccgccgccaccgattgtaatcacattcgatataattaaacaccgttgcccgcattatttcccggctgataaagtgttctccatggatacattccactttcagcgaatgaaagaagctttccacgcaggcattatcgtagcagcaaccttttgcgctcatacttccacgcagattatgccgcttcagttgcgcctgataatctgctgaacagtactggcctccacggtccgtgtgaacgataacgttccggggcctcttacgccgccacagcgccatctgcagggcatcgcaggccagttgcgccgtcatgcgtggcgacattgaccagccaataacggcacgtgaccacaggtcaatgaccactgccagatacagccagccttcatctgtacgtaagtacgtgatgtctcctgcccacttctggttcgggccactggcgtaaaaatcctgctccaacagattttctgacacaggcaggccgtgtgcgcggtagctgaccgggctgaacttccgggaggcctttgccctcagtccctgacggcgcaggcttgccgccacggtttttacgttaaaggggtaaccctgagcacgcagttcatccgtcaggcgtggggcaccgtaacgctgttttgaccgggtaaaagccgcgaggacaacgctgtcgcagtgttggcggaactgctgacgcgtgcttatccttgtccgccgctgacaccacgtataccagccgctgcgggccacccggagcacgcggcacattgctttgatgctgaactcagcctgatgtttttcaataaagacatacttcatttcaggcgcttcgcgaagtatgtcgcggccttttggaggatagccagctcttcatcccgttctgccagctggcgtttgagacgtgcaatctcggtagacatctccagttcacgttcagaagacgtctgctgattttgctgtttactgcgccagttgtagcgctgtgattcatacaggctgagttcacgggctgcggcagtaacaccgatgcgttcagcaagcttcagggcttcactgcgaaattcaggcgaatgctgtttacggggttttttactggttgatactgtttttgtcatgtgagtcacctctgactgagagtttactcacttagccgcgtgtccactattgctgggtaagatcaggcggttaaaggcatcaaccgcgaacaactgcagacgatgattacggaatcaggcattgcgctggatattagctgtgataacacgccgcgccagcaggttattgggggaacgcaggctgcgttgaatgaatttgccacgctgctgatggccgctggatacgaaccggttaaactcggtgtgagcggtgcctggcacacgcgtttgatggaagacggcgttcaggcaatgcgcgattatcttgccggactggatatcgcttcgccagagcatcaggttctgatgaacgtaacagcaaaaagcgaggtcgctccgtcaattatcaaagaaaatctctcattacacttaactcatacggtgaaatggactgaatctttcgatacatttctgaatatgccaaccccggtagctttccttgaaataagtaataagccctatttggggaatatgttaaatgattttgctggcgtggttcagcaacgagttatgcattgtcgtaaagcatttagtgatgcaaaggtattcaaatgattcctgattatttaacttttattcgctttcaggataaacgaaatctgatatacatttatgctattggacttattctgataggcttttattggaagaatgcagggtttacttttccatcagaggatattggtgtagttagtgggattctggccctggtgctgtataattttatttttgatctcaaggcgtactgggcttataaatgcgtcacgaagaatatcgatttttcgtggtttaagaaaaagcagaaccacaaaatagaattatttcttacacaacctctggtggcaggatttctgtcgttaatcatgttgagtgcaatgagttgggggctataccagcttctaccctcgttatatgcgctgttcctgatttcgttacttgggccgttggtcatctttctgctgtttcggatgatccgcaccagttatgtcaagcaggtcgctatttcagtagcgaaaaaagtaaaatataaaagtctgactcgctatgtgctgctttcggtgtgcatctcaacggttgttaacctgcttactatcagcccgttgcgtaacagtgattcttttgtgacagaggggcagtggttaacgtttaaatcgataattgcattgctcattctttgtggcgtagtgttggcgattaatctgttttttctgcgcttctccaagcggtacgcttttctgggcaggctttttttgcaggaaatcgatctgtttttctccagtgaaaatgcgttgtcgaccttttttgccaagccgctttggcttcggttattcatattgctggttattgaaatgatgtggattacgctggtgtcggtattggcaacgcttgtggaatggcggatttggtttgaagcctattttttactctgctatgtaccgtgcttaatttactattttttccattgtcgattcctctggcataacgattttatgatggcatgtgacatgtatttccgttgggggcattttaataagtgaggaagttacaggaagtgaccagataacgcatatatgttctctactatcttgcgcattttgattgttgactgagtaaccagacagttgatgtgcacaatttcccctcgccctaacagacgtgggcgggggcacccggtgtgtgcaatatacgaaaaaaaagcccgtactttcgtacgggctcttctttaaatatggcggtgagggggggattgactcgcttcgctcgccctgcgggcagcccgctcactgcgttcacggtctgtccaactggctgtcgccagttgtcgaaccccggtcggggcttctcatccccccggtgtgtgcaatatacgaaaaaaaagcccgtactttcgtacgagctcttctttaaatatggcggtgaggggggattcgaacccccgatacgttgccgtatacacactttccaggcgtgctccttcagccactcggacacctcaccaaattgtcgttcctgtcttgctggaacgggcgctaatttagggaaatcatgacctgaggtcaacaaactttttgaaaaaatcgcgcgtttattcaaacttcaatcaatgtgtggttttaataagcgaaatctgctttttttgccaccgaccacggatttgttatgctggtggcctttgtagatcataacgataagtgcgaataaatttcgcacaacgcttttcgggagtcagtatggatatcatcttttatcacccaacgttcgatacccaatggtggattgaggcactgcgcaaagctattcctcaggcaagagtcagagcatggaaaagcggagataatgactctgctgattatgctttagtctggcatcctcctgttgaaatgctggcagggcgcgatcttaaagcggtgttcgcactcggggccggtgttgattctattttgagcaagctacaggcacaccctgaaatgctgaacccttctgttccactttttcgcctggaagataccggtatgggcgagcaaatgcaggaatatgctgtcagtcaggtgctgcattggtttcgacgttttgacgattatcgcatccagcaaaatagttcgcattggcaaccgctgcctgaatatcatcgggaagattttaccatcggcattttgggcgcaggcgtactgggcagtaaagttgctcagagtctgcaaacctggcgctttccgctgcgttgctggagtcgaacccgtaaatcgtggcctggcgtgcaaagctttgccggacgggaagaactgtctgcatttctgagccaatgtcgggtattgattaatttgttaccgaatacccctgaaaccgtcggcattattaatcaacaattactcgaaaaattaccggatggcgcgtatctcctcaacctggcgcgtggtgttcatgttgtggaagatgacctgctcgcggcgctggatagcggcaaagttaaaggcgcaatgttggatgtttttaatcgtgaacccttaccgcctgaaaatccgctctggcaacatccacgcgtgacgataacaccacatgtcgccgcgattacccgtcccgctgaagctgtggagtacatttctcgcaccattgcccagctcgaaaaaggggagagggtctgcgggcaagtcgaccgcgcacgcggctactaataaagcatcaggattcctgctatccttggcgggaattgaatacaggagagagttatgtatcccgtcgaccttcatatgcataccgttgccagcacacatgcatatagcacattgagtgattacattgcccaggccaaacaaaagggcattaaactttttgcgatcaccgatcatggcccggatatggaagatgctccgcatcactggcacttcattaacatgcgtatctggccgcgagtggttgatggggtagggatcctgcgcggcatcgaagctaacattaaaaatgttgatggtgaaattgattgcagcggtaaaatgtttgactcgctggatctgattattgccggttttcatgagccggtttttgcaccacatgacaaagcgaccaatacacaagcgatgatcgccactatcgccagcggcaatgtgcatataataagccatcccggaaatcccaaatatgaaatagatgtgaaagccgttgctgaagcagccgcgaaacatcaggtggcgctggaaatcaataattcttcatttttacactcacgtaagggcagtgaagacaactgtcgtgcggtagccgcagcggtacgtgatgctggaggttgggtggcattaggctcggattctcacaccgcgtttaccatgggggaatttgaagagtgtcttaaaatcctcgacgcggtagattttccgccagagcgcattttgaatgtttcgccgcgccgcttactgaacttccttgaatctcgcggtatggcaccgattgcggaatttgcagacctttaattactagtaatggaaatatattaatgaacgagttttctatcctctgtcgtgtgctgggttcgctctattaccgccaaccgcaagatcctttactggtgccgctgtttaccctgattcgtgaggggaaactggctgcgaactggccactggagcaggatgagttactgacgcgtttacagaaaagctgtgatatggcgcaagtctctgccgattacaatgcgttgtttatcggcgatgaatgtgccgtgccgccatatcgtagcgcatgggttgaggacgcaacggaagcggaagtgcgcgcttttctttccgaacgagggatgccactggcggatacgccagccgatcacatcggcacattgctgcttgcggcttcctggctggaagatcagtcaacggaagatgagagcgaagcactggaaacactgttcagtgagtatctgttaccctggtgtggtgcgttcctcggcaaagtggaggcccatgcaaccacgcctttctggcgcaccatggcaccgctaacccgtgatgccattagtgcaatgtgggacgagctggaagaagattctgaagagtaaatgtgatcatcgtcactcataactgcaacagataatttgttgttgcataaaatgtgtgctcgatctcattcatggccgcgttttctgctatcatgcgcggcatgaacatacttctctctattgcaatcacaacaggcattctctccggtatctggggatgggtggctgtttccctgggcttactaagctgggcgggcttcctgggctgtacggcctactttgcctgcccgcaaggtgggctgaaagggctggcgatctccgctgcaaccctgcttagtggcgtggtgtgggcgatggtcattatttacggtagtgcactggcaccacatctggaaattctcggttatgtcataaccggtattgtcgcgtttctgatgtgtattcaggccaaacagctgctgctttcatttgttccggggacgtttataggcgcatgcgcgacgtttgccgggcagggtgactggaaactggtgttaccttcgctggcgcttgggctggtatttggttacgcaatgaaaaacagcggcctgtggctggcggcgcgtagtgcaaagacggctcaccgtgagcaggaaatcaaaaataaagcgtgaggggcactcacgctttcgcttaaacagtaaaatgccggatgataattccggcttttttatctgtcaggattccggtggaaccgacatatggcggtatttcaccagaatgtcgttctgccgttctgctttgttctgcaaatcccacagaccacggtcgataccatcattaatcaggaaaatgacccctgtttcgatagccgacatcagacacagcataacgggttcgtttgaggtgtaacccacttccccttccagcaagcgctggtagtcaataaagcggaaaaccccggcctgaacttcataggaaagtatcgtcttactggtgttcaccgaggagaggatctcaccggtactcacattgacgacgcgcaggttcacggcaatctgatcgagctggtattgcgtgtctgcaccgatcccaaaatatcttgccccaacaccgcccgatttaacgttgctttcataaccgataatcgaaccttcaaccataatatttgccgccgttaaagattgcagcgggattcggttattaatggcaaccgtgccgttttcttgtgccgcacgaataatcttgcgctcgttaagcaggttttgtaagccctggcgctccagcggtataaaccagcgagaatctttcaatgccgtgaccagcattgccgtggcgctttgcggaacagcagtggagaagttacttgccgggtagggtttaaattgcccggtttcgtcctgaatgttgtataccgaaacaaagatcttacccgtcggcgctggcagatgggtcaaatctttgtagctctgagctcgaggcattaatgtcggtctggcggcttctttaggcggggcggttaagcatccgctcagtaacatgacggcaaccaaaagaaataagcgctgcatgattattttccttatgaagctggggcttaaaaatcggttgagttattttgtaaacccgaaacctggatggtcgaggtttgtccggttttacgatctgtcacgttcaactgcaattgaccatcgcggttagcaatatcaacaatataatcgttggtcaccatgcggcccggtttaccggtattaatattcgacagtagcccacctaaaatttgtgactggatggcctgagtaaagttatctaacgctgagggtgtttcaataccaaagtcatcgttatagctcggatctttataagagttttgggcctgagcgctatttaataaaaaagcgccattatttgggttaccaccaaagtttggattacggaactggaaagtcatggttccagcccaacttaatggcgaaataagcatgagtagaactactgcatgtttgacacgcattgcagcctccgaacaattttttatttagaattcatcatgcgccaaatcgcccgtacttaataacgcctgatttatctggcgacgatttagtgcttcttcagtttgaatcagtgcaaagacgacagttttctcgaagtctcttttcaacggaaataaaaaagtctggaaaataacgtcctgattgaccgttatagtgatccagcttccccatcgtgcactgggcctttcattaatcgttaagttacccgtatagtcactttcccatttatcactaaaggctcggtaaaaatcatggccaatagatgaaacagtatggtcagttaacaatcccgggacttctacctcaacggcgtgaagattccctgcggcgaacagaaattctgccgccacaatccagcgtaaataacgtttcatggctttatcgcctgaggttatcgtttgcccaggaaaccgcttgtgtccggttttttacggctatcttcttgaaaagattataaagatgcgttttaaccgtattttcgctgatgaacaacgaacgagcgatctcgttattagacgcgccgatacgcagcttattcaggatctctttttcccgatgagtaaggagggctgattccgtgctgttataacgatagttaccagaatgtgtaatcaggtaactggcaagcttttgcgtaaagtagcattcgccgcgcaggacgccttgcaacccattgacaacacgttcttgatcctccatggcataaaaaacgccgttgatatgaggccagttttcaatgtcgcggtacgggtaatcttcaggcgtatttagcaacaatattttgatattgttgtttttcctgctcaaagtatcctgccaataatggataagctttttatctgcttccatcatatccagaagaataatagagcctgaagatatatcgtccagagaacgttgaatattatgtaattttcctgtaattgccagcgattgtttaaggtgctgcaagagagctgtcgcttgcaaagacggtttagtgatcaacaataatgtatgaccatgaatactatggacttcattaaacatgatgaaaccccgctttttttattgatcgcacacctgacagctgcctctaaaatagaagcaccagaagtactgacagatgttgcactgctgtgtgtagtaataaatcagccctaaatgggtaaaatataaaactaatggattacatctgatttcaatctagccattacaaatcttaaatcaagtgttaaacatgtaactaaatgtaactcgttatattaaaatgttaatcttaaggttttattaagtttagaaatgatagaaaagttgtacatttggtttttattgcacaattttaaaaaatcatacaaatggtgataacttactaataatacatataaaaaatatttcggtgtagtcctttcgtcatgtaaaacgttcttgttttttctccgcacctccgtggacaattttttactgcaaaaagacgaggtttgtcacggcttgtgcgcaagacatatcgcagcaatcagcgacgggcaagaaaaatgactgtctggtgatttttgatagcggaaaacggagatttaaaagaaaacaaaatattttttgcgtagataacagcgtatttacgtgggttttaatactttggtatgaacaaaaaaagaaaaatacaacgcgcgggtgagttattaaaaatatttccgcagacatactttccatcgtaacgcagcgttaacaaaatacaggttgcgttaacaaccaagttgaaatgatttaatttcttaaatgtacgaccaggtccagggtgacaacatgaaaaacaaattgttatttatgatgttaacaatactgggtgcgcctgggattgcagccgcagcaggttatgatttagctaattcagaatataacttcgcggtaaatgaattgagtaagtcttcatttaatcaggcagccataattggtcaagctgggacgaataatagtgctcagttacggcagggaggctcaaaacttttggcggttgttgcgcaagaaggtagtagcaaccgggcaaagattgaccagacaggagattataaccttgcatatattgatcaggcgggcagtgccaacgatgccagtatttcgcaaggtgcttatggtaatactgcgatgattatccagaaaggttctggtaataaagcaaatattacacagtatggtactcaaaaaacggcaattgtagtgcagagacagtcgcaaatggctattcgcgtgacacaacgttaatttccattcgacttttaaatcaatccgatgggggttttacatgaaacttttaaaagtagcagcaattgcagcaatcgtattctccggtagcgctctggcaggtgttgttcctcagtacggcggcggcggtaaccacggtggtggcggtaataatagcggcccaaattcagagctgaacatttaccagtacggtggcggtaactctgcacttgctctgcaaactgatgcccgtaactctgacttgactattacccagcatggcggtggtaatggtgcagatgtaggtcagggctcagatgacagctcaatcgatctgacccaacgtggcttcggtaacagcgccactcttgatcagtggaacggcaaaaattctgaaatgactgttaaacagttcggtggtggcaacggtgctgcagttgaccagactgcatctaactcctccgtcaacgtgactcaggttggctttggtaacaacgcgaccgctcatcagtactaatacatcatttgtattacagaaacagggcgcaagccctgttttttttcgggagaagaatatgaatgcgttattactccttgcggcactttccagccagataacctttaatacgacccagcaaggggatgtgtataccattattcctgaagtcactcttactcaatcttgtctgtgcagagtacaaatattgtccctgcgcgaaggcagttcagggcaaagtcagacgaagcaagaaaagaccctctcattgcctgctaatcaacctattgctttgacgaagttgagtttaaatatttccccggaagatcgggtgaaaatagttgttactgtttctgatggacagtcacttcatttatcacaacaatggccgccctcttcagaaaagtcttaatttgttgaaatatcgagcataagatgaatctggagagaatggtctgctgcgaatcagccaacctgaaagtatggataacacaaccctcaaggatgactaatcattgaggaaatagaataaatgttcagaccttttttaaactctcttatgctcggcagtttgctttttccttttattgccatcgcaggaagcaccgcgcaaggggggggatccatttttatggccaaattgtggaaccggcatgtgacgtcagcacccagtcatcacccgtagaaatgaactgcccacagaatggttctgttccgggcaaaacctattccagcaaagcgttaatgagcggtaatgttaaaaacgcgcaaatagcctcagtaaaagtgcagtatcttgataaacagaaaaagctggctgtaatgaacatcgaatataactaagtttctgaacaacgcacgttgctgagcagaaaaatgcgatttaaccaaaaagcctgctgtacacttaagaaacaagaaggtgtaaggaggcgttatgaaaacgcgtattcatgttgtgcagggtgatattaccaaactggccgttgatgtgattgtgaatgcggctaatccgtcattaatgggaggcggcggcgtcgatggggccattcatcgcgcagcgggtccggccctgctggatgcctgtttaaaagtcaggcaacagcagggcgattgccctacggggcatgccgttattacgcttgcaggcgctcttcccgctaaagccgtagtgcacaccgtcgggccagtctggcgtggtggtgaacaaaacgaagaccagcttttgcaggatgcctatctcaatagcctacgactggtggcggcaaacagctatacgtcagtggcttttcctgcaatcagtactggggtttatggttaccctcgtgcggcagcggctgaaatcgcagttaaaaccgtttcagaatttattacccgtcacgctttacccgaacaggtatactttgtctgttatgatgaagaaaacgcccacctctacgaaagactccttacccaacaaggagatgaatgatttgccccggctggcgagcgcggtgctgccactgtgttcgcaacatcccggtcagtgtggtcttttccctctggagaaaagtctggatgcgtttgccgcccggtatcgtctggccgaaatggcagagcatacgctggatgttcagtattacatctggcaggacgatatgtcgggtcggttactgttttccgccctgttagccgcagcaaagcgtggcgttcgcgtccgtttgttgctggacgacaacaatacgcccggacttgacgacattttacgcttgcttgacagccatccccgcattgaagtccggctttttaatcctttctcgtttcgcttgctgcgtccgcttggttatatcaccgacttttcccgtctcaatcgccgtatgcacaataaaagtttcactgtcgatggcgtggtgacgctggtaggggggcgaaatattggtgatgcctattttggggcaggggaagagccacttttttcggatttagatgttatggcaatagggcccgtggtagaggacgttgccgatgatttcgcccgctactggtattgcaaatcggtttcacccttacagcaagtgctggatgtcccggaaggtgaaatggcggatcgcatcgagttacccgcctcctggcataacgatgctatgacgcatcgttacttacgcaaaatggaatccagtccgtttataaatcatctggttgatggaacgttgccgcttatctgggcgaaaacacgtttattaagtgatgatccggcgaaaggggagggcaaggcaaaacggcattcactgttaccgcagcgcctgttcgatatcatgggctcacccagtgaacgcatcgatattatctcttcctattttgtaccgacacgcgcaggtgtggcgcaactcttacggatggtgagaaaaggggtaaagattgcgatcctaaccaattctcttgccgctaacgatgttgctgtcgtccatgccggatacgcgcgctggcgcaaaaaattgctccgctatggcgtggaattatatgaactcaagccgacgcgtgaacaaagtagtacgttacacgatcgcggcataaccggtaattccggagccagcctgcatgctaaaacctttagcatcgatggtaaaacggtgtttatcggctctttcaatttcgatccgcgttcaacattgctcaatactgaaatgggcttcgtgatagagagcgaaacgctggcacagttaattgataaacgctttattcagagccagtatgatgcggcctggcagctccgtctggacaggtggggacggatcaactgggttgatcgtcatgcaaagaaagagattattctcaaaaaagaacccgccaccagtttctggaagcgggttatggtcagactggcgtcgatattgcccgtggaatggttattgtaaatgtggcttaacggctggtgctttatcgttctcacgcttaacaaccggtttaccagaaaacaaaaacttcagtaacgggatgcgtaaatgaatttcatacagaattatcgcaatccctactacgaatatcaggccacagagaaaaccaagccagttggaggtgatgtgcggtgtaatgtatgcgccgaaaaacagcgttaacgggtggtgaaccagatagataaatagcgatgcgttaacaaaataagtcacccgcgctgactggaagttaagcaaacggtggccaaaggagaagaccacattcaccatccacagaccgaggaccatggtgatcactgactcggtttcgtacatccaggcatcgccactgccatagcgctggttgagtaaataagcgacaaacgccaatgctgcagcgagggtacagccacgagacggcgtggtaaacaaggctttaagatgagggaaaatgaaagccagtgcgccgaggataaagaacggtaaataaaatagcgtttgcatgacaataaaattgaacatgccattactcagaatgggcggatacacaataaaaatcgttcttcttattaccgcataaccgatgccgaggcataaaaaaatcaccgatagttttaccatcgagaattttttattcgttttatcagaattttctaaattatttctgatgcgcttaaatatccatacgcacagcgtcgtcatgactactaacaccagtaaaaaccacaggtgtgatattaattcccaggccaacgtattatatttgtcatacaatgacagcccaggccaactttccgcttttcctttgacatattgcagcataataaattgcggtaatgtcagtagggggatggctgttaacatcgggatacctacacgttcgacacgtactttccaccattttttcaagggatagcgtaaaaaaagcatgtaggaaaagtagccggatataacgaaaaatacctgcatgcggaacgagtggatgaagtcattaaaaagggtcagccacaatgatggttcggcgctattcacatgccatgtatggctcgaatagattaaagaaatatgaaaagggatccctaacaacatcagccaggcgcggatggagtcgaggaaatattcacgttgcgcgggtactggattcatatatggttaactaatctcggatttttcgtcttatccctgtcgggttatgcctttaggcttgttgccatagcgacaccgacctgaccgcgccaggcgcaggcttcaaggtttttatgcatagcatcatcgctaccactaaccagaatggaagcgtctgtaagacggttgataaataaaattgctggcaaaccctacacgaagtcgatgcttctgtctttaggagaagcacggaaagtgaaaacggttgcaatcagatgcttaatccatgagccagcgtgctgaacgataccgggattctgttgtcggaatggctggttatccattaaaatagatcggatcgatataagcacacaaagggggaagtgcttactaattatgaaacataaactacaaatgatgaaaatgcgttggttgagtgctgcagtaatgttaaccctgtatacatcttcaagctgggctttcagtattgatgatgtcgcaaagcaagctcaatccttagccgggaaaggctatgaggcgcccaaaagcaacttgccctccgttttccgcgatatgaaatacgcggactatcagcagatccagtttaatcatgacaaagcgtactggaacaatctgaagaccccattcaaactcgagttctaccatcagggtatgtacttcgataccccggtcaaaataaatgaagtgactgccaccgcagtcaaacgaatcaaatacagcccggattatttcactttcggcgatgttcagcatgacaaagacacggtaaaagaccttggttttgccggttttaaagtgctttacccgatcaacagcaaagataaaaacgatgaaatcgtcagcatgctcggggccagctatttccgcgtgattggtgcaggtcaggtttatggcctttctgcccgcggcctggcaattgataccgccttgccatcgggtgaagaatttccacgcttcaaagagttctggatcgagcgtccaaaaccgactgataaacgtttaaccatttatgcattgcttgactcgccgcgcgcgacaggtgcttacaaattcgtggttatgccagggcgtgacacggttgtggatgtgcagtcgaaaatctatctgcgcgataaagtcggcaaactgggggttgcaccgttaaccagtatgttcctgtttgggccgaaccaaccgtcgcctgcaaataactatcgtccggagttgcacgactctaacggtctctctatccatgccggtaatggcgaatggatctggcgtccgttgaataacccgaaacatttagcggtcagcagcttctctatggaaaacccgcaaggcttcggtctgttgcagcgcggtcgtgatttctcccgctttgaagatctcgatgatcgttacgatcttcgtccaagcgcatgggtgactccgaaaggggagtggggtaaaggcagcgttgagctggtagaaattccaaccaacgatgaaaccaacgataacatcgtcgcttactggacgccggatcagctgccggagccgggtaaagagatgaactttaaatacaccatcaccttcagccgtgatgaagacaaactgcatgcgccagataacgcatgggtgcaacaaacgcgtcgttcaacgggggatgtgaagcagtcgaacctgattcgccagcctgacggtactatcgcctttgtggtcgattttaccggcgcagagatgaaaaaactgccagaggataccccggtcacagcgcaaaccagcattggtgataatggtgagatagttgaaagcacggtgcgctataacccggttaccaaaggctggcgtctggtgatgcgtgtgaaagtgaaagatgccaagaaaaccactgaaatgcgtgctgcgctggtgaatgccgatcagacgttgagtgaaacctggagctaccagttacctgccaatgaataagacaactgagtacattgacgcaatgcccatcgccgcaagcgagaaagcggcattgccgaagactgatatccgcgccgttcatcaggcgctggatgccgaacaccgcacctgggcgcgggaggatgattccccgcaaggctcggtaaaggcgcgtctggaacaagcctggccagattcacttgctgatggacagttaattaaagacgacgaagggcgcgatcagctgaaggcgatgccagaagcaaaacgctcctcgatgtttcccgacccgtggcgtaccaacccggtaggccgtttctgggatcgcctgcgtggacgcgatgtcacgccgcgctatctggctcgtttgaccaaagaagagcaggagagcgagcaaaagtggcgtaccgtcggtaccatccgccgttacattctgttgatcctgacgctcgcgcaaactgtcgtcgcgacctggtatatgaagaccattcttccttatcagggttgggcgctgattaatcctatggatatggttggtcaggatttgtgggtttcctttatgcagcttctgccttatatgctgcaaaccggtatcctgatcctctttgcggtactgttctgttgggtgtccgccggattctggacggcgttaatgggcttcctgcaactgcttattggtcgcgataaatacagtatatctgcgtcaacagttggcgatgaaccattaaacccggagcatcgcacggcgttgatcatgcctatctgtaacgaagacgtgaaccgtgtttttgctggcctgcgtgcaacgtgggaatcagtaaaagccaccgggaatgccaaacactttgatgtctacattcttagtgacagttataacccggatatctgcgtcgcagagcaaaaagcctggatggagcttatcgctgaagtcggtggcgaaggtcagattttctatcgccgccgccgtcgccgcgtgaagcgtaaaagcggtaatatcgatgacttctgccgtcgctggggcagccagtacagctacatggtggtgctggatgctgactcggtaatgaccggtgattgtttgtgcgggctggtgcgcctgatggaagccaacccgaacgccgggatcattcagtcgtcgccgaaagcgtccggtatggatacgctgtatgcgcgctgtcagcagttcgcgacccgcgtgtatgggccactgtttacagccggtttgcacttctggcaacttggcgagtcgcactactggggacataacgcgattatccgcgtgaaaccgtttatcgagcactgcgcactggctccgctgccgggcgaaggttcctttgccggttcaatcctgtcacatgactttgtagaagcggcgttgatgcgccgtgcaggttggggggtctggattgcttacgatctcccgggttcttatgaagaattaccgcctaacttgcttgatgagctaaaacgtgaccgccgctggtgccacggtaacctgatgaacttccgtctgttcctggttaagggtatgcacccggttcaccgtgcggtattcctgacgggcgtgatgtcttatctctccgctccgctgtggtttatgttcctcgcgctctctactgcattgcaggtagtacatgcgttgaccgaaccgcaatacttcctgcaaccacggcagttgttcccggtgtggccgcagtggcgtcctgagctggcgattgcactttttgcttcgaccatggtgctgttgttcctgccgaagttattgagcattttgcttatctggtgcaaaggaacgaaagaatacggcggcttctggcgcgttacattatcgttgctgctggaagtgctgttttccgtgctgctggctccggtacgcatgctgttccatacggtcttcgtcgtcagcgcgttccttggctgggaagtggtgtggaattcaccgcagcgtgatgatgactccacttcctggggtgaagcgttcaaacgccacggctcacagctgctgttagggttagtgtgggctgttggtatggcgtggttggatctgcgtttcctgttctggctggcaccgattgtcttctcgttgatcctgtcaccgtttgtttcggtgatttccagccgtgccaccgttggtctgcgcaccaaacgctggaaattgttcctgatcccggaagagtattcaccgccgcaggtactggttgataccgatcggttccttgagatgaaccgtcaacgctcccttgatgatggttttatgcacgcagtgtttaacccgtcatttaacgctctggcaaccgcaatggcgaccgcgcgtcaccgcgccagtaaggtgctggaaatcgcccgtgaccgccacgttgaacaggcgcttaacgagacgccagagaagctgaatcgcgatcgtcgcctggtgctgctaagcgatccggtgacgatggcccgtctgcatttccgcgtctggaattccccggagagatattcttcatgggtgagttattacgaagggataaagctcaatccactggcattgcgtaaaccggatgcggcttcgcaataaaaacgtagttgcctgatgcgctacgcttatcaggcctacatcgttcctgcaatttattgattttgcaagattttgtaggttgggtaaggcgttcacgtcgcatctggcaaaaacaacgagccaataaaaataccggcgttatgccggtatttttttacggaagaggtatcaaatgcgtttaattgtggtgagcatcatggtgaccttgctgagtggctgtggcagcattattagtcgcactataccggggcaggggcatggcaaccaatattatcccggtgtgcaatgggatgtgcgtgactccgcctggcgttatgtcacaatccttgatctgccattctccctggtttttgatactttactgctgccgctcgacattcatcatggcccgtatgagtgattaacgttcatcccactcatcagctgctgcgcgtccttcctcggtatccagcggtggctcaagctgaaattccccctcgtcccattcatgtaatgtattctcttcctgccactcctggcggatctctatctcatcatagtcgccatcaaaaacactttgcgcggcttcaccgctaagcataggtaaacattcaccttcttccccttcgtcggcaaaaaactcaacttgccacatgatgtcgccgtcctgcaaaacgtatttttgggcattgaactgttgcacattcgcgtcttcggcgtcgatgccggggttgtctgcaagaaattcttcgcgtgcagcgtcaatggcttcttcaagcgttgcgtacatggtcatcacgattctccctttgagttgatgaggtttcagggaaaaggatagctgattctccgcttttgcaagtatgaaaggcgaaaaatcagttcgatacctggggtattcgacgacgacgtagactgttccatgaatagactgcgttgaataacactacgccagcggtgacgagaaataccgctctgaaaccgtagtttgctgaaatcgctgctcccatcaatggtccggtaacgttgccaatatcacgaaacgattggttatagctgaagatacgcccggcgatctggttgctcgagttataaactaatagtgtctgtacggcggggagtagtgcaccatcggcggcaccgagcaaaaaacgtaaaatcccaagttgcaatggcgtctgaacgtaagacattgggatcaacagcagtacagaaaagatcagcgccgtaatcaggatcttttcgggtccgattcgatcgccaagtttgccgagtcgtggtgcacttagcagagccgccacgcctggcaccgaggcgatcatgccactgataaaggcgacgttactgacgttacccgccagttcgcggacatacagcgtcagaatgggggcaattgagcctgtcgccacctggatgattaacgtggtgacaaacaggctgagtaccagtttcgggtttttaagtgatgtcaccacttcccgcatgtgcagcatctcttttttgctgaccggctggaatttttctctgatgcagaacagggtgacgaaaaagcagagtatgagcacactggcggtaataaagaataccggacgtaagccgtagctatcggcgagcaggccgccagccattgggccgagcaacgcaccactaacgccgcctgtggagagcgtacccagcgcccagccgcttttattacgcggtacttgtgtggcgataagagcattagcgttggggacaaatccgccaagtaacccaagaagcgcccgtaggatcaaaaactgccagatattttgtgccagtcccatcaacaccatcacgatgcccatgccgagggcagagcgtaatagcatgagttttcggcctttacggtcggcgagtccaccccaaaacggtgaggcgatggacgaaaataaaaatgtaatgctgaagacaataccggaccacatattcagggcggagtgaccggtaactccaagctgctcaacgtagaggggtaggaagggcattaccagactgaaggcggcaccggtaagaaaacagcctagccaggcgacgatcaggtttcgtttccagtttataggggtgtcattttcacagggtgacatagcaatccgctgttggtgcgccaggcgcggtgaacataagaagaaaagataagcacactaattatgcgcccgacttccagggggcgcaatccagagagcttttatcgctaaatcagggggatttgctgtggtaatgccggatgccattctgaagcatccggcaggggagatttaatagcgtgaaggaacgccttccgggcgtgttttaaagcgacggtgtaaccacatatactgctctggtgccatcatgatgcatttttcgaccactttgttcatccacgcggcggtagtttcggcatcatccagtggcggagaacactctggcggcagcataatcaattgataccctttgccatctggcttacggcgtggaacgaagggcaccagacatgcgccggacatccgtgccagcatccaggttccggtcgtggtcgcagcctgctcaacggcaaataacgggacgaaaacgcttgagcgcgggccgtaatcatgatccggtgcgtaccagaccacttcgccttttttcagggctttaatcatgccttttaaatctttgcggtcgagcatcgatttatttgagcgcaaacggccccaggtttgtagccagtcaatcagtggattatcgttcgggcggtaaacgccaatccccggttcctgcataccaaactgccgcgcgcccagttccagtgtcagaaaatggatgccaactaacaggatgccgcgtttttgcgcctgcacgtcacgaatgtgttccatgccgatcactttagtccagcgggcgattcggcggtccggccagaaccacgccatgccggtttccatcaggcccatgccaacggattcgaaattcttcaccaccattttacggcgttcttgttcgctcatttccgggaagcacagttccaggttgcgatgcacaatttttgcgcgtcgtttcataaaacgtaacgccagttttcctaatccacaaccgaggcggtagataaccgggtagggcaattgcacgactaaccaaagtacgccaatacccaaccaggttaaccaataacgcggatgaagcagtgcggtggagaacttgggtagattcgtcatatcaatcctgtttttcaacctattcgggcaattgtatgtattgtcgcattttttcgcccgcaaccaaaatttgtggctgaagactgggcgaaattgccgcgcttgtaaataacaaataatttttaatgcgcaaatgtagcgtaaaatgtgtggatgttaattatcgataattgctatatcatgccgcggatttttactttcccatctcgcaggaaccgtacaccatgccagtgttacacaaccgcatttccaacgacgcgctaaaagccaaaatgttggctgagagcgaaccgcgaaccaccatttcgttttacaagtatttccacatcgccgatcctaaggcgacccgtgacgctttatatcagctgtttaccgcgctgaatgtttttgggcgagtgtatctggcgcatgagggcattaacgcgcaaatcagcgtacctgcgagcaatgttgaaacatttcgcgcgcagctctatgccttcgacccggctttagagggtttacgcctgaatatcgcgttggatgatgacgggaaatccttctgggtactgcgcatgaaggtacgcgatcgcattgttgccgacggtattgacgatcctcactttgatgccagcaatgttggtgagtatctgcaagcggcggaagtgaacgccatgcttgacgatcccgatgcactatttatcgacatgcgtaaccactatgagtatgaagtggggcactttgaaaacgcgctcgaaattccggcagataccttccgtgagcagctgccaaaagcagtcgagatgatgcaggcacataaagataaaaaaatcgtcatgtactgcaccggcggcattcgttgtgaaaaggccagtgcctggatgaaacataacggattcaacaaagtctggcatatcgagggcggaattattgaatacgcccgtaaggcgcgcgagcagggcttgccggtgcgttttattggcaaaaattttgtttttgacgagcggatgggcgaacgtatatcggatgagattatcgcgcattgccaccagtgcggcgcgccgtgcgacagccataccaactgtaaaaatgatggctgccacctgctgtttattcagtgtccagtatgcgcggaaaaatacaaaggttgttgtagtgagatttgctgcgaagaaagcgcgttaccgccagaagaacagcgacgccgtcgggcaggacgtgaaaatggcaataagatctttaataagtctcgtggacgtctgaatacaacactgggcattcctgatccaacagaataaatatcattgccggatgcgtgccatccggcaacatttcacgcttacttctgctgtacgccttccactgaaataatcagatccacttcctgagaagctggacctaaatctgtcttgatattgaagtccttgagcttaattttgccttcggcctcgaagcctgcacgtttaccaccccatgggtcgtcgccctgaccaattaatttcgcttccagcgtgacgggtttggttacgccattcagcgtcagatcgccggtaatatccagttcgtcaccgtctttcttcacgctggtggaggtgaatgttgcctgtggatattttgcggtattgaggaaatctgcactgcgaagatgtttatcgcgttcggcgtgattagtatcgacgctggtggtgttaattgtcacattcactttatcggcagccggatttttttcgtcaaaggtaaaagtaccgtcgaaatctttaaaggtgccgtataaccagctatagccaaggtgctggatgcggaaattaacaaaggcgtgctgaccttctttgtcaattttgtaatcggcggcaaccgctgaaccggcagagaacatcagggacgcgaaggttaaaccaagcaggctttttttcattttttatactccatagtcagatgacgactttcccagcatgcgcttcagagtgtcgtctttatcgatgaaatgatgcttcagggccataaatccgtgcataacggacagtactacgacgctccacgcgagccaaaaatgcagggcaccggcaaagtctgcctgtgcgccagcgtcggcaagggtcgcggggacgtcaaaccagccaaaaacgctgatcggtttaccatcggcagttgagatcagatagccgctgatgccgatggcgaacagcaataggtacaatgcgagatgtccagcctttgcggcaagacgagtcatgggcgaataactcggcagcggacccggcggtggagatatgacacgccacagaacgcgaataaccagccccatcattaacaaaataccgatgcttttatgcagttcgggtgctttgtgataccagccatcgtaataactgagcgtgaccatccacagacctaaagcaaacatgccgtagacaataattgcgcttagccaatggaaggccgcagatataacaccatagcgttcaggggtatttgtgaatgacataagtgcatccaatacgaatttgcgagagaaagaaaatggcgtgtcggagaatgaattgcaacacaaaaataacaaattgaatgatatttatttttatttcaataattttgaattaataatgaaagaatcttcataagtttagtgggttcagcatcagagatgtctggtgagtgctgtagaagcaggaataatctcattcaatttttcacgccaaatgaaagggagattaaatatttgtcagtttatgtcagtgcggaaaactaaaaataaaacacatagatcagatccataattgccaacaatccccagagaaaaagataaagcatcagatgctcgcgaatattattgatgagatagtgcaacagccgacgcattaaatactcctgtaaaaacggcctcattctggaggccgtaatgatgattattggaagcgggaaagcctgaatggcgtcaaatcaaaatcgctttttttgtcttgcgcaaaatcggcagctatttcccctaaaactgacgcaaatttaaaaccgtgcccactcaggccggtaatgagcagtgtattatcgtggccgggtagggtatcgataataaaatcttcgtcaggcgaattatcataggtgcaggcagcgccgtacaggcagcaaccgatacccggcaatacattgcgcaagaacgggaaggcttccgaaccatcgctgaccacttccgcaaacggaacacgttcatccgctgaatggataacctggcctccgttatgtttgccaatcttcaacgcgtcgttttctgccggaaaaccataatattgatcgccattgggcagttcaccggtaaacgccgggaatttattcttcacgctatagcggccatcggcctgataccaggcaaatactttacgtacgggctggacaggcagctccgggagcaggtcttttacccatgttcccgcgcagacaatcgcttttttcgcctgatactcaccgtcaacggtttcaatagttacgccatcatcgtcatgacgaattgcggtgaccgggcagttgaacagttgcgcacagcccgcttccttcgccagttggatccaggttttaatcgccagttcgctgcgcaaaaaaccggaatcagtctcaaataagccgatgtagttgtccgggacgcgtatttctggccagcgggccataatcccttgcgcatcgagcttttcaacgttgagttgccactgttcggcgctgtgggcgacgttggcgagaaatgcggagtcagccgggccgaggttaatgacaccagagcgtacaaaaatgggatcatcttcgttgtggcgggaaagttcatcccacagcgtttgcgcgcggaggaccaacgggacatacttttcgccttcaccataagcatggcgaattaatcgcgtatcgccgtggtggctgccgtgttgatgcggtggcatatgggcgtcggtcattagcacgtttaaaccggcgcgggttgcataatacccggcggcagcgcctacggaaccgctgccaataatgatgagatcgtatttcatttttttctctctgctctcatggtttaagcagagtaattaactgaatgcagatatacaacccagaaatggtaaaggcaccggtgaggtgccttttgggtggatggtcatgtcatgttaatgacgccgatactcgtttaccgggaaatcaccggattcaattttggcgattcctgcttctaatatcgaaataaattgtctggcaacatcagtggttaaccagagcgtctgaccaacttcagtcccttcctgctcggacttatttggggtctggtagtgcaaacgcaacatcagcgcatcatagctatcaacggtgctgatgtcccaccctacgagcggatgagtctgaatgacttcattatttttttccatcatggccccctaattcgtgttactagacaacgttattcgaggttcaatgcgtttttatctgaagcaacttcagtataccaataagtaagggtattcaccgaatttttaaaggggggaacagataaatttctgcttttaagatttatatgaacaataaaacagcatgtcattcatatttttttagcatattgtgcaattattttgaggaagtgtagaaattttgtactcaaaatttgtaagtaaaataaaaaagccggggcgacccggcaaaaacaaaaatcactgcatattattcgctgacaaaccagtcatcggcgctttcccacgtttcctggagaatttcgctaatgcgctgtttatcttcttttgttgcgccaataaccgataaattattcgctgcggcataacgtaccgatacgtggccttcattatcaggaaacgcatactgaatacggcgggaaagttcgccagccagggcgtcaatagccccagctggcaatggagaagttttcgctatggtgacttcaattcgcataatagccccctgttgaatatactggttatttatacaggtaaaataacctaatgacaacaggaagctacaatttttattgtttaacggaccagcgtaccgtttccccggcgaggaatggcaccagggtgtcatcagtcagtgcgatgctttcagcaacctgttgctcttcacgtaccagttcgatgaatgtgtcgttgaccggcaagccatagaactgcgggccgtttacagaacagaatgcttcaaagtgctgcagagcattcatctcttcaaagacggtagcgtaactgcccagcgcggttggggcgttgaagcagcccgcgcagccgcaactgctctctttgcgatgacgtgcatgtggcgcagaatccgtaccgaggaatactcgattaaaaccgctggcgaccagttcacgcaatgcctgttggtgaatattgcgtttgaggatgggtaaacaatacaggtgcggacgcacgccaccaaccagcatatggttgcggttaaacatcagatgctgcggagtgatggtggcagccagccgttcatttccgtcacggacatagtcggcagcatctttggtggtgatgtgctcaaaaacgactttcagcgcagtcaggcgttggcgcagaggttccatcacgctttctataaagcgcgcttcacgatcaaaaatgtcgatatctgcatgtgtcacttcaccatgcaccagtagcggcataccgattttttccatgcgctcaagtaccggcatgattgcgtcaattgacgtcacgccgtggctggagttagtggttgcgtttgccggataaagttttgcagcggtgaacacgccttcgttaaatccgcgctccagctcattaggatccagcgaatctgttaaataacaggtcatcaatggggtgaaattgtgcccggcaggtacggcatcaagaatacgttggcgatacgccacggcagcctcaactgtggtcacgggcggagccagattgggcattacgatagcccgtccataaatttcgctggtatacggcacgacagtttttaacatgtcgccatcgcggaggtgaaggtgccagtcgtctgggcggcggatctttaatacctgggatggtgcagtcattaatctctatgctccggctgaagggatgtttttgccggacacaaaggataagcggaaacgtttccctttgcacgaaaaataaagggcgcgaatgcgccctcgtgattaatcagtaaatggaatgacaatttcgcctggcttcacttcaatgcctttcgccagttttttcgccattgcttcgccctggctgccatcttcgcgcaggacgtaagcaggttgctggttaaagtaattgcgtaatgcctggttcaaatagggaagcaacgtttgcatcaccgtttgcattttttccggttgtaccgtcgcatcgaccacttccatctctttcaggaagatcgcgcctttttctttatcaaacacgggcagcgctttcagcttcagtttcatggtcgctttctggctaccgaacagggagttcatgtccagattggcgtctccggttagggtaaccttattcggctcttcgcgaccaatttggctggtcaggtttgtcagaacaatatgggcgtcagccacgccgggtaaaccgatatcttttgagaaattattatgtttcgcaagcgactggttaatttcttgttcggtgatggtgtattgggtgagttgattacagccaacgagcaggccactgacgatcaatgcagcggcaaataaaaacttgttcatggtagtcctcgacatgaaatctgcgtcaatatcctgacacaacgcagcatgtgtcaccagcgataaactcaccagcagaaaaaactgaaaacggcggcaacccgcgaatacaggctgccgcggcgggtcaggattaaatcgccattgatgataacaaattgatttgtgtctgtttcgccatattatcgcggtaatcagcaacgcggcttggccagttgattccggctaccagcgtcagattacgtagtagcggaaatagctgaatatcatcttctgaaagttcgccattcacggcgttcggtttgacgatcagtttatccagcgcacgtaaatcatcgctgatattcttaatcagaccgtcagagtgggccagcaggtcggcaaaattacccgcgctggcctctttcttgtcgacgaaatatttgcgtgcggcgggagtagaaaactcatcaaatgccgatttggcaaaacgcggcaacagcagtttgttggcgtagccattgaccttgcgcagccactcttcaatggcaggggaacgtttgccggtcagtaacggtttgccgtcgagtttatcgacatagtgaacgatgtccatgctttctggcatatagcggctgtcatctttttgcagaatgggaacctgtttttgaccgaccatccgggtgggtgtttctgcgtcgtcgttgagcagaacatgtaattcgacggggatatttttcaggccgaaaatcatgcgggctttgaggcagtaagggcagtgatcgtaaatgtatagcttcacgtgactcctccatttggctgtcagttcactttcagtatggaggagtcaggggggagtatcaaatcaggcgtcgcgttcaagcaaacgacgcgcggcgcgtttctggctaaactgccaacccagcgcaaggaaagtgaagatgccaataatgcccagcatcatccacggaagctctggctggtgcgccgatttacccaggtcaaacagccagccgccaccgatataaccaatagcgccgccaatcgccagacccagacggctacaccccatatagctgccgcgagctcttgcgtccgccagcgaagcacttaaggtttcacgcgcaggctcggcaatgatcgacccgatataaaacagacaaatcagggtgaaaagttgttgcaggccgctgaccatgcccaccggcatcatgcttaatgacattatcaacagcccagccatcaaccggtgttccagacgaaaatgcttttcactccagcgggcgatagggtagagcaacgttaacgacagacacgcttcaatggcatacatccatttaacggcagagggcgcgccagccacgtcgttgaccataattggcagcatcagcatcacttgtacagccagcatgtagtaacccgccagcgtcaggacataggtgacaaaacgcttgtcacgcatcacgcgggtcatgccttcgcgaacgggcgtgcgtacggtggagagtttccatgctggtaacaaccacgcattgaacgctgcacacagcacaaacaaaacggcccctgtggcgcagaccaggcgaaagtcgtattgcaacagccagctccccaacaatgcgccaatgactgcaccggcactgtcctgcatcatcaacagcgagaaaaaacgaccacgctgttgtggacggattagtttcaccaccagcgccgaacgcggcggatcaaacaacgtgccgccgagtcccgagagcaggcatgaaaaccacaatagccacggttcgtgggcgatacccattgtggcgaatccggcagcgcgcatcagcataccggtaacaatcatcggtttggcaccaaagcggtcggcaattgcgccgccgaaaatacccagaccttgctgaataaactggcgtagaccgagagcaataccgaccatgacggcggcccagcccatttgatcaacgaagcggatagagatcagcgggaagacaacaaagaaccccagcacgaccagcatattatcgatgagcaggaaatatttacccaggttcctcgcctgcgacacgcgggacatttcccctcccgggaaataaaagatgagcactttctattctgcattgccgctaagacttttcccatcacttcggggacaatatttttttatcaaaacgtcgctttgatagagagtttttatcaaatatgtgaataatgcagaaaatggcattttggacttttcacagggtctggttgcgcaggtatagtaatacttacagcgtattaaagacgttacgggaaggagtaggtatagaatgtttggctatcgcagtaacgtgccaaaagtgcgcttaaccacagaccgactggtcgtgcgtctggtgcatgatcgtgatgcctggcgtcttgcggattattacgcagagaatcgccatttcctcaagccctgggagccagtgcgcgacgaaagccactgttatccatcaggctggcaggccaggctggggatgattaacgaatttcataaacaaggttcagctttctactttggtttattcgacccggacgaaaaagagattattggcgttgccaatttttccaatgttgttcgcggctcttttcatgcctgctatctcggttattcgattgggcaaaaatggcagggcaaaggactcatgtttgaagccctgaccgcagccattcgttatatgcagcgcacccaacatattcatcgcattatggctaattatatgccgcacaataaacgcagcggtgatttactggcgcgactgggttttgaaaaagaaggctatgcgaaagactatctgttgattgatggacaatggcgcgatcacgtactgacggcattaacgaccccagactggacgcccggccgctaaggagaatctcatgaaatatcaacttactgcccttgaagctcgcgtgattggttgcttgctggaaaagcaggtgaccacgccggagcaatacccgctctcagtcaatggtgtagtcacggcctgtaatcagaaaacgaaccgtgaaccggtcatgaatctgagtgaatccgaagtgcaggaacagctggataatctggtcaaacgtcattatctacgcacagtgagcggttttggtaatcgggtcaccaaatatgagcaacgtttttgtaattcagaatttggcgatctgaaactgagcgcagcggaagtggcgttaatcaccacgttgttattgcgtggtgcccagacgccaggtgaactgcgcagccgcgccgcgcgaatgtatgaattcagcgatatggcggaagtggagtcgacgctggaacaactggcaaatcgcgaagatggtccttttgtggtgcgtctggcccgcgaaccgggtaaacgcgaaagccgctacatgcatcttttcagtggtgaggttgaagatcagccggcggtgacggatatgtcgaacgcggttgatggtgatttacaggcccgcgtcgaagccctggaaatcgaagtggcagaactgaaacagcgtcttgattcgttgctggcccatctgggagattaaagtgaaaaaattacgtatcggcgtagtgggattaggtggcattgcgcaaaaagcgtggttaccggtgctggcggcagcgtctgactggacgttacaaggagcctggtcgcctacgcgcgcgaaagccctgccaatttgtgaaagctggcgcattccttatgccgattcgttatccagccttgccgccagttgcgatgcggtttttgtgcattccagcaccgccagccactttgacgtggtcagtacgttactcaatgcgggtgtacatgtctgtgtcgataaaccgctggcagaaaatctgcgcgatgctgaacggctggtggaactggcggcgcgtaaaaaactgacgttgatggtcggttttaaccgtcgtttcgcaccactctacggtgagttaaaaacgcaactcgctaccgcagcttcgctaagaatggataaacatcgtagcaatagtgtcgggccacacgatctttatttcacgttgctggatgattatctgcatgtggtggataccgcgctgtggttgtcgggcggcaaagcctctctggatggcggtacgctactgactaacgacgctggcgaaatgctgtttgccgagcaccatttttcggccggtcctttgcagatcaccacctgtatgcatcgccgtgccggaagtcagcgtgaaaccgtgcaggccgtgactgacggtgcgctcatcgacattacggatatgcgcgaatggcgtgaggagcgcgggcagggcgtagtgcataaaccgattcctggttggcagagcactcttgaacaacgtggatttgtcggctgtgcgcggcacttcattgaatgtgtgcaaaatcagacagttccgcaaaccgccggcgaacaggccgtgctggcgcaacgtatcgttgacaagatctggcgcgatgcgatgagtgaataaaccctgtaacatctggcggtagcaattcaccataatccaggtagactattcgcctctttcagcgcctgccttgcaggcgttttgcccgtgggtctggattagaacaccgatgaatttattaaaatcgctggccgccgtcagctcgatgaccatgttttcgcgtgtgcttggcttcgcacgagacgcaattgtcgccagaatctttggcgcagggatggcaaccgacgcctttttcgtcgctttttaaacttcctaacttgttacgccgtatctttgccgaaggggcattttcccaggcatttgtaccgattctggcggaatataaaagtaagcagggtgaagacgccacgcgggtctttgtctcttatgtttctggcctgctgacactcgcgctggcggttgtgacggtcgctggcatgctcgccgcaccgtgggtgatcatggtgaccgcgccaggcttcgctgacactgccgacaaatttgccctgaccagccagctactaaagattacctttccctatatcttgctgatctccctggcgtcgctggtgggagcgattctgaatacgtggaaccgcttctcgattccggcgtttgctccaacactgcttaacatcagcatgattggtttcgcgctgtttgccgcaccgtactttaacccaccggtgctggcgctggcgtgggctgttacggtcggcggcatcctgcagctggtgtatcagctaccgcacctgaagaagatcggcatgctggtcctgccgcgcattaacttccacgatgccggagcaatgcgcgtggtgaaacagatgggaccggcgatccttggcgtctctgtgagccagatctccttaatcatcaacaccatttttgcctcgtttcttgcttccggttcggtgtcttggatgtattacgccgaccgcttaatggagtttccgtctggtgtgctgggcgtggcgcttggcaccattttgctgccgtcgctgtcgaagagttttgccagtggcaatcatgatgaatacaaccgtttgatggactgggggctgcgtctttgtttcctgttggcgctgccgagtgcggttgcgttgggcattctttcaggtccgttgaccgtttcgctgttccagtacggtaaatttaccgcctttgatgcgctgatgacccagcgggcgttaattgcctactcggtgggtttgattggcctgattgtagtgaaagttttggctcctggcttttattcccgccaggacattaaaacgccagtgaaaattgccatcgttacgctgattttaacgcaattgatgaacctggcgtttattggtccgttgaaacatgccgggctgtcactttctattggtctggcggcgtgtctgaatgcttcgctgctttactggcagttgcgtaagcagaaaatctttaccccgcaacccggctggatggcgtttctgttgcgtctggtggtggcggtactggtgatgtctggcgtgcttttaggtatgttacatatcatgccggagtggtcattgggtaccatgccctggcgcttactgcgtttaatggcggtcgtgctggcggggattgccgcgtacttcgctgcactggcggtactgggcttcaaagttaaagaatttgcccgccggacggtgtaacaatgcattccggcctgcagtgcaggccggagataatattcagatcgaaatctttttaccgccgcgatgggttgttgaggtctgaccgttcgccccatatagcgtcggttcctgatgcggtttcaacatttccagcgcctgttgattgtgctcaatctgtccttccagtaaccagccgttatgttgattcatttggcgtagttgctgcgttttcacagtaatttcctgccagcgttgactaatatcaacgctatttgctgtattgggttctttcttgcgtaactgttcgaggtaatccagcgtcgccagcagtgagcttttttgttctgtaatccattgcaactggctgccgttgatctgccccatagagagatgttgctgctcttgatccattaccgttttgagatcgttaagcacagcggacatctggtcgaggatctctgcaagacgtgtcatacgatcagttactctgcaagtcttgctgcgcttcgttgatcagcgcatcggcaattttgccggtgtccatttttagttcaccgttacgaatcgccagttttaacgcttcgacacgttcaagattgatatcactgctgccgggttgcatcagttttgcttgcgcgtcgcttaacgtcacactggtgctggtggaggcggttgtttttgccgcccggctgttcgttaccggcgcgtcagtggtttcgcgcggttgaacggtgcttacaggcttcagaggcgaagtgcgatcaatactcatggtttattcctcattgagggcgcttttatcatgtgttgcttatttatcggcaagggacgggtaatctttaacagcttacaggtttataagaatattcccatctgcatcaacaacgccgctgactacctgtcccgataccatgcgcacccgcgcattctgtgcgacggctgcattgttcagcgcctgaccttctgcgttggcgctaaacccatcaccgctggcgatcacattgacgcgttgtcccgcttttacccgccatgcctggcgaaactgggttaactggataggttgatcgggtgatagatcgcgcaggctaatggcatcaacaagttgattgatatccagcaccgtacgcggtggcagggtatccagccgtccgcgttttagtttgacattgccagcttccagctttcctccccgcacaatgggcatcgcggcaaccacataatttcctgtggcctgcacattaacctgtaaatatcgtttgtcgttaccgcagcgtgccaacacattcacattgccccacaggcgggaattattgctcatcgaaagcaatggctgctcgcatggcggtagtagattgggcgctgtacgaatagaaacacgaacctcatcacttacccccgcgagttgggcgctaaaaaagttgtgcaattgcgatgtgagattgctcgccgtacttaacggactgaacagtatcgcgatgatcgccacgctacgttttattgtcagcattttcgcccccagccatttctacaacgtgaattgtacctgtccgcaatgaccatcaacggcataaatagcgacccattttgcgtttattccgccgataacgcgcgcgtaaaggcatttaagctgatggcagaattttgatacctgcggaggagatatgctcgataagctcgacgccgccttacgttttcaacaagaggcgctcaatctgcgcgcccagcgtcaggaagtgctggcagcaaacatcgccaatgccgatacccctggttatcaggcgcgcgatatcgattttgccagtgaacttaaaaaagtcatgcaacgtggacgggatgcaaccagtgtggttgcactgacgatgacctcaacgcaacacatcccggcgcaggcgctgacgcctcctaccgcagaactgcaataccgtattccggaccagccttcgcttgacggtaataccgtcgatatggatcgcgaacgcacccagtttgccgataacagcctgcaataccagatgagccttagcgcgttgagcgggcaaatcaaaggcatgatgaacgttttacagagcggaaattaacggatggcactgctgaatatttttgatatcgccgggtcggcgttaactgcccagtcccagcgcctgaacgtggcggccagtaatctggcaaatgctgatagcgtgaccggtcctgatggacagccatatcgggcaaaacaggtggtattccaggttaacgctgcaccaggtgctgcgacaggcggcgtaaaggttgccgatgttatagaaagtcaggccccggacaaactggtttatgaaccgggtaatccgctggcagatgcaaagggctacgtaaaaatgccgaacgttgatgtcgtcggggagatggttaacaccatgtcggcgtcacgcagctatcaggccaacgttgaagtgctcaacacggtgaaaagtatgatgctgaaaacccttacgctcggtcaataaaggagaaagctatgtccattgcggtaaccaccaccgatccgacaaataccggcgtcagtaccaccagcagtagttcgctcacgggcagcaacgccgcagatttacaaagcagttttctgactttgctggtggcgcagctgaaaaaccaggacccgaccaatccaatggaaaacaacgagctgacgtcgcaattggcacaaatcagcacggtcagcgggattgaaaaactcaataccacgctcggatctatttccggacagattgataacagccagtcgttacaggccagtaacctgatcggtcacggcgtgatgatccccggcacaactgttcttgcgggaaccggcagtgaagaaggggctgtgaccacgaccacgccgtttggtgttgagctgcaacaggcggcagacaaagttacggccaccatcaccgataaaaatggcgcggttgtgcgcaccattgatattggtgaactgaccgctggagttcacagtttcacctgggacggtacgttgactgatggcagcactgcgccgaacggttcttacaatgtagcgattagcgccagtaacggtggtacacaactggttgcccagccgctgcagtttgctctggtgcagggtgtgatccgcggcaacagcggtaatacgctggatctcggcacttacggcaccaccaccctcgacgaagtacggcagataatttaagccttcacatttcaggagtcagtcatggccttttctcaagcggttagcggattaaacgctgccgccaccaacctcgatgttattggcaacaatatcgccaactccgccacctacggctttaaatcaggcacggcctcttttgccgatatgtttgccggttcgaaagtgggactgggggtaaaagttgccggtatcactcaggactttaccgatggcacgaccaccaacaccgggcgaggtctggacgttgctatcagccagaacggttttttccgtctggtagacagcaacggttcggtgttctacagccgtaacggacaatttaagctggatgaaaaccgtaacctggtgaatatgcaaggtttacagctgacgggttacccggcaaccggtacgccgccgactattcagcaaggggcgaatccgaccaatatttcgatcccgaataccctgatggcagcgaaaactaccaccacggcatcgatgcagatcaacctgaattccagtgatccgcttcctactgttacgccattcagcgccagcaatgcggatagctataacaaaaaaggttcggtgactgttttcgacagtcagggtaatgctcatgacatgagcgtctactttgtgaagaccggggataataactggcaggtctacacccaggatagcagtgatccaacaggtacagccgagcctgcaatgaagctggtgtttaatgccaatggcgttctgacctcaaatccaacagagaatattaccactggcgcaattaacggcgcagatcccgccacgtttagcctgagcttcctcaactccatgcagcaaaataccggcgctaacaacattgtggcaaccacccagaacggctacaaaccgggcgatctggtgagttatcaaatcaatgatgacggtacggttgtcggcaactattccaacgaacaaacccaactgctggggcagattgtactggcgaactttgccaacaacgaaggtctggcatccgaaggcgacaacgtctggtctgcgacgcaatcttctggcgtggcgctgttggggacagccgggacgggcaactttggtaccctgaccaacggtgcgctggaagcgtccaacgtcgatctcagtaaagaactggtcaatatgatcgttgcccagcgtaactatcagtctaacgcccagaccattaaaacccaggaccagatcctcaacacgctggttaacttacgctaatcgctgacgggatagctcaatggatcacgcaatttataccgcgatgggagcagccagccagacgctgaatcaacaggcggtaaccgccagtaatctggccaatgcctctacgcccggttttcgtgcgcagttaaacgccttgcgcgcagtgccggtggaagggctttcactgcctacgcgcacgctggtaacggcgtcaacaccgggtgcagacatgacgcccggcaagatggattacacctcgcgcccgctggacgttgcgttgcagcaggatggttggctggccgtgcagaccgctgacggcagcgaagggtatacgcgtaatggcagcattcaggttgatcccaccgggcaactgacaattcaggggcatccggtgataggcgaggcggggccaattgctgtgccggaaggggcggaaatcacgatagctgccgatggcacaatctcggcgctgaatccgggcgatccggcaaatacggttgcgccagtggggcgtctgaagctggtgaaagccacgggcagcgaagtgcagcgcggtgacgacggcatttttcgtttaagcgcagaaacccaggccacgcgtgggcctgtactgcaggcagatccaaccttgcgtgtgatgtcgggtgttctggaaggcagtaacgtcaatgccgttgcggcaatgagcgacatgattgccagcgcgcggcgttttgaaatgcagatgaaggtgatcagcagcgtcgatgataacgcaggccgtgccaaccaactgctgtcgatgagttaattgaaaggatacatgacaagtataagttgcccgatgcgcaagtttatcgggtctatgggggcaatcgcaatttatcgattttgcgagcacttgtaggccggataaggcgtttacgccgcatccggcaagaagacatatgcactttgtcactaatccactacaggacattttatgatcagttcattatggatcgccaaaacgggccttgacgcccagcaaaccaatatggacgtcattgccaacaacctggcaaacgtcagtactaacggttttaagcgtcagcgcgcggtgtttgaagatctgctttatcaaaccattcgtcagccgggggcacagtcttccgaacaaaccaccttaccctccggattacaaatcggcacgggggtacgcccggtcgccactgaacgcttacacagccagggcaacctgtcgcagaccaacaacagcaaagatgtcgcgattaaagggcagggctttttccaagtgatgttgccagatggctcatcagcctatacccgtgacggctctttccaggtggatcagaacgggcagttggtgacggctggtggttttcaggtgcagccagcgatcaccattccggcgaatgcgttaagtatcaccatcggtcgtgatggcgtggtcagcgtaacccaacaaggccaggcagctccggtccaggttgggcagctcaatctcaccacctttatgaatgataccggactggagagcattggcgaaaacctctacaccgaaacgcaatcctccggtgcaccgaacgaaagcacgccgggcctgaacggtgcgggactgctgtatcaagggtatgttgaaacgtctaacgtcaacgtggcggaagaactggtcaatatgattcaggtgcaacgcgcttacgaaatcaacagtaaagcggtgtccaccaccgatcagatgctgcaaaaactgacgcaactctaaggcataaccggtggcaggttcaccggtttattgatttttgaagatgatagccatgcaaaaaaacgctgcgcatacttatgccatttccagcttgttggtgctttcactaaccggctgcgcctggataccctccacgccgctggtacagggagcgaccagtgcacaaccggttcccggtccgactcccgtcgccaacggttctattttccagtctgctcagccgattaactatggctatcaaccgctgtttgaagatcgtcgaccacgcaatattggcgatacgctgaccatcgtgttgcaggagaacgtcagcgccagcaaaagctcctctgcgaatgccagccgtgacggtaaaactaattttggctttgatactgtgccgcgctatttgcaggggctgtttggtaacgctcgtgccgatgtcgaagcctccggtggtaacacgttcaacggaaaaggcggggccaatgccagcaatacctttagcggcacgttgacggtgacggttgaccaggtactggtcaacggcaacctgcatgtggtgggtgaaaaacagattgccattaatcagggtaccgaatttattcgcttctctggcgtggttaatccacgcaccatcagcggcagcaataccgtaccgtctactcaggtggcggatgcgcgcattgaatacgtaggcaatggctacattaacgaagcgcaaaatatgggctggttgcaacgtttcttccttaacctgtcgccaatgtaagtgaggctgtggtgattaaatttctctctgcattaattcttctactggttacgacggcggctcaggctgagcgtattcgcgatctcaccagtgttcagggggtaaggcaaaactcactgattggctatggcctggtggtggggctggatggaaccggtgaccagacgacccagacgccgtttaccacacaaacgcttaataacatgctctcacagctgggaattaccgttccgacgggcaccaatatgcagctaaaaaacgtcgctgcggtaatggtgacagcgtcacttcctccgtttggacgtcaggggcaaaccatcgatgtggtggtttcctccatgggtaatgccaaaagcttgcgtggaggtacgttgttgatgacaccgcttaagggcgttgacagtcaggtgtatgcgctggcgcagggcaatattctggttggcggcgcaggagcctccgctggcggtagcagtgttcaggtgaaccaactgaacggtggacggatcaccaatggtgcggttattgaacgtgaattgcccagccagtttggcgtcgggaatacccttaatttgcaacttaacgacgaagatttcagcatggcgcagcaaatcgctgacaccatcaaccgcgtgcgtggatatggcagcgccaccgcgttagatgcgcggactattcaggtgcgcgtaccaagtggcaacagttcccaggtccgtttccttgccgatatccagaatatgcaggttaatgtcaccccgcaggacgctaaagtagtgattaactcgcgcaccggttcggtggtgatgaatcgcgaagtgaccctcgacagctgcgcggtagcgcagggaaatctctcagtaacagtcaatcgtcaggccaatgtcagccagccagatacaccgtttggtggtggacagactgtggttactccacaaacgcagatcgatttacgccagagcggcggttcgctgcaaagcgtacgttccagcgccagcctcaataacgtggtgcgcgcgctcaatgcgctgggcgctacgccgatggatctgatgtctattttgcaatcaatgcaaagtgcgggatgtctgcgggcaaaactggaaatcatctgatgatcagcgacagcaaactactggcaagtgcggcctgggatgcgcaatcactcaacgaactaaaggcgaaagcgggcgaagatccggcggcaaatatccgtccggtggcccgccaggtggaagggatgttcgtgcagatgatgttgaaaagcatgcgcgacgctttaccaaaagatggcctgttcagcagcgagcacactcgtctgtataccagtatgtatgaccagcaaattgcccaacagatgacggcgggcaaaggtctggggcttgcagagatgatggttaaacagatgacgccagaacaaccattgccagaggagtccacgccagcagcaccgatgaaattcccgctcgaaactgtggtgcgttatcaaaatcaggcgctttcgcagctggtgcaaaaggccgtgccacgtaactacgatgattcgctgccgggtgacagtaaagcattcctcgcgcaactctcgctgcccgcccaactggcaagccagcaaagcggtgtgccacatcatttgatcctcgctcaggcggcactggaatctggttgggggcaacggcaaatccgccgcgaaaacggcgagccgagctataacctgtttggtgtcaaagcctctggcaactggaaagggccagttactgaaatcaccacgactgaatatgaaaacggcgaagcgaagaaagtaaaagcgaagtttcgggtctacagctcgtatctggaagcattgtcggattacgttgggctgttaacacgtaacccgcgctacgccgccgtgacgaccgccgcgagtgcggagcagggggcgcaggccctacaggacgcggggtatgctaccgatcctcactatgcccgtaaactcaccaacatgatccagcagatgaaatcgataagcgacaaggtgagcaaaacctacagcatgaacattgataatctgttctgaataactcaagtccggcgggtcgctgccgataatactctgtaattgaaggcttataaggaacctccatgtccagcttgatcaataacgccatgagcggactgaacgcggcccaggcggcgttaaatacggcaagtaataatatctccagctataacgttgccggatatacccgccaaaccactattatggcgcaggccaatagcacgttgggcgctggcggctgggttggcaatggcgtctacgtttctggtgtgcagcgtgagtatgatgcgtttattaccaaccagttacgtgctgcgcagacgcaaagtagcggcctgaccgcccgctatgagcagatgtcgaaaatcgacaatatgctctccaccagtacctcttcgctggcaacacagatgcaggatttcttcaccagcctgcaaacgctggtgagtaacgcggaagacccggcagcgcgccaggcgctgattgggaaatcagaagggttggtgaatcagtttaaaaccaccgatcaatatctgcgcgaccaggacaaacaggtcaatatcgcgataggtgccagcgttgatcagatcaacaattacgctaaacaaattgccagcctgaacgatcaaatctcgcgcctgacaggcgtgggggcaggggcgtcacctaacaatctgctggatcaacgcgatcaactggtgagcgaattaaaccagattgttggtgtagaagtcagcgttcaggatggtggcacttataacatcacgatggccaatggctactcactggttcagggaagtacggcgcggcaacttgcggcagttccttccagcgccgacccttctcgtacgactgtcgcttatgttgatgggacggcaggcaatattgagatcccggagaaattactgaataccgggtcgctgggcggcattctgacattccgttctcaggatctggaccagacgcgtaatacgcttggacaactggcgctggcatttgccgaggctttcaacacccaacacaaagccggatttgatgccaacggcgatgctggtgaagatttctttgctatcggtaagcccgcggttctgcaaaacacgaaaaacaaaggtgacgttgcgatcggtgccacggtaactgatgcctccgcggtactggcgacagattacaaaatctcgttcgataataatcagtggcatgtcacccgccttgccagcaataccactttttcggtgacgccggatgccaacggtaaagtggcatttgatggtctggagttgacgtttacaggaacgcctgccgttaacgacagcttcacgctgaaaccagtaagtgacgccatcgtcaacatggatgtattaatcactgacgaagcgaaaatcgcgatggcgagcgaagaagatgcgggtgatagcgacaaccgcaacggtcaggccctgctggatctgcaaagcaacagtaaaacggtgggcggtgcgaaatcttttaatgacgcttatgcctcgttagtgagtgatatcggtaataaaaccgctacgttgaaaaccagtagcaccacgcaaggtaatgtggtgacgcagctttccaatcagcagcagtcgatttccggtgtcaatctcgatgaggagtacggaaatctgcaacgttttcagcagtattacctggcgaatgcgcaggttctgcagacggcaaacgcgatttttgatgcgctgattaacattcgctaaggggagataaaatgcgtttcagtacccagatgatgtaccagcaaaacatgcgcggcattaccaattctcaggcagaatggatgaagtacggcgaacagatgtcgacgggtaagcgagtcgttaacccttcagatgatcccattgctgcatcacaagcggttgttctctcccaggcgcaggcgcaaaacagccagtacacgctggcgcgtactttcgccactcaaaaagtgtcactggaagagagtgtacttagccaggtcaccactgctatccagaatgctcaggaaaaaattgtctacgccagcaatggcaccttgagtgacgatgaccgggcctcgctggctacggatattcaggggcttcgtgaccagttgctgaatctggcgaacaccactgacggtaacgggcgctacatttttgccggttataaaacagagactgcgccgtttagcgaagagaaagggaaatacgtcggtggagcagaaagtattaaacaacaggtcgatgcttcgcgttcgatggtgatagggcacacgggtgacaaaattttcgacagtattaccagcaacgcggtagcggaaccagacggtagcgcttctgaaacaaatctttttgccatgctggatagcgccatcgcagccctgaaaacgccggtcgcggatagcgaagcggataaagaaaccgccgctgcggcgttagataaaaccaaccgcggactgaaaaactcgctgaacaatgtgctgaccgttcgcgcggaattaggcacgcagctgaacgaactggagtcgctggatttattaggtagcgatcgcgcattagggcaaacgcagcagatgagcgatctggttgatgtggactggaatgcaactatttcatcttacatcatgcagcaaacggcattgcaggcatcgtataaagcatttaccgatatgcagggattgtcgctcttccagctcaacaaataagctcgctttaaaacatatcatgaaactgggtatgttttgtctgcctgctctgggatcgccggggcgggcattttttttgcctattttgcattgttggttagcaaggatgccatttgatgaattttaatatgttgattcaaagatgaaataaaaaagccctggcagttaccagggcttgattactttgagctaattattactcaacaggttgcggacgcgcaggagcggcagaggcatgatgcgttgccgtatgaccacctgcggcacctttaccttcgaaggcaaaagtagggcgctgccagtcactgtgacgtggtgcctccggaacatattccggtgccggagcgcgtgtcattggcgcggtagcgtggttatgctcaacggtgatctcaggttcaaccgcggctaccgtttcaacttctgctgcgacttcagcgacgactggcgcggcaggttgagtaacaacttcaggttcagcaaccacaacctcagcagtttcggcaacttcttcaatatctgccgtctcttcctgcggttcaaccaccggttctgcgtgttctgcaacttcctgggctacggcaacatcagactcggtaatcacctgcggctgttcagttaccgcggcggcaattacttcaggatgcgtcgtttcaaccacttccggttgcggttcggcaacctgaacgggggcttctacgacttcagccacttcttcaataactggcgcgctaacaaccggttcgatagcggcggcgacagggacctcagtcaccatcggctgcacttgtacttcttcctgttcgcgctgctcttcaacctgtacatcttgcggacgtacaattggatagcggatccagactttgccagaggccagttccggagacgcgcacgctacggtcaacggcattggcgactgggttggataacgctcgtcacgatagcgacgacgacgctgaccactcacgcgcaggtgacgaggcgagcggcgagaacgacgcggcataccaccgttgtcacggttatcggcattgttctcttcttgctgttctggtgcagtttgcgctacgactggcagcgggactttcaccagttctgtgcgtggagctggcgcttcctgaacaattggttcggcagcgacagtttcttcaaccaccggtgcgactaccgcttcttcggctacgctttgctcgtaacgcactttctgattgagctgacgctgtttacgacgcggctgaaccggacgtacacgttcttcctgttcggtttcctgaacagattgctcttcaacattcagcgccttcgcttcttgttgcgcctgacgtttatcatcgttacggcggcggctacgttcacgacgcggcgcttgctgctcgtcggtggtacgcgctttttccgttacctcagtctgctgacggctctcacgcgtctcggcagtctgctgctgtgcctggcgacgattacgacggttttcttcgcgattatcgctgccttcagtacgttcgctacgggtgtcgcggcgctcattacggtcacggcggctgttctgacgaggcttgcgacgatcctgttgacgttccggtttcgcttctgctttcggtgctggttgctcggtcggtttggtttcttcaccaccgctgaacagcgctttcagtgcgccgaagaagcggctcaacagcccaggttgtgcaggagctgctggtgttgccggtgcagctttcggtgatggagctacgacaggcgcggcaggttcagctggcgttggcgctggcggcacatccggcatggcaaaggttgccagcgcaggttgttccggacgcttacgttcagcgaactcttcttcagacggcagcgccatcgcttcttcatgcagcttcggcagcatgtagcttaaggttggggtttcttcccctttacgcacgcgcagcacgtggtagtgcggggtttccatctgatcgtttggcacaatcacgcagcgaacaccgtcctgacgcgtttcaatggcattcaccgcagaacgtttttcattcagcaggtaagaagcgattggcacaggaacaatggcgtgaacttcctgggtgttctctttcagcgcttcttcttcgatcagacgcagaatagagagcgacagcgattcgttgtcacgcacggtgccagtaccagaacaacgcggacaaacgtgatgactggattcacccagtgatgggctcaggcgctgacgggacatttccagcaggccaaagcgagaaatatggctgatttgaatacgcgcacggtcctgacgcaccgcttcacgcagacggttttctaccgcacgctggtggcgtactggcgtcatgtcgatgaagtcgataacaatcaggccgccgaggtcacgcaggcgcagctgacgagcaatctcatcggcagcttcgaggttggtgttaaacgcggtttcttcgatatcgccgccgcgggtcgcgcgtgcggagttgatgtcgatggcagttaacgcttcggtgctgtcgataacaatggaaccaccggatggcagacggacttcacgctggaaggcggattcgatctgcgactcgatctggtagtggctgaacagcgggatctcgccggtgtacagtttgattttgctgctgaaatccgggcgacctaatgcagcgatatgctgacgtgccagttcgagcactttcgggttatcgataaggatttcgccgatgtcctgacgtaagtaatcgcggaatgcgcgaacgattacgttgctctcctgatgaatcaggaacggagccgggcggctttcagcggcttttttgatggcttcccagtgtttcagacggaagcttaaatcccattgcagcgcctcagcagatttgccgacgccagcggtgcgcacgataagccccatgccttccggcagttcaaggcttgccagtgcttcttttaattcggtacggtcgtcgccttcgatacggcgagaaatgccacccgcgcgcgggttgttcggcatcagaaccagatagctacccgccagactgataaaggtggttaatgccgcgcctttgtttccgcgctcttctttatcgatctgaacaatgacttcctgaccttcacgcaacacatctttaatgttgggacgaccatgagcactgtagttagcagggaaatattcgcgggcaatttcttttagtgggaggaaaccgtgacgttcagcgccgtaatcaacaaaagcagcttccagactcggttcaatgcgggtgattttacctttgtagatgtttgcctttttctgctcgtgccctggactttcgatatccaggtcatacagacgctgcccatctacaagggcaacgcgcaactcttcctgctgagttgcgttgattaacattcttttcatcgtaacttactcattattcttacattgacgactaagctgcgggcaaagtaacgcctttccgggtgtgaaccgatggcctcgtgtctagtcgcgtcgccaacctcacggttatcgtcagctcaaagaggcgcagagtgtcggttgcccgtttttcatgcggaaaaacagcgcaattatcaaagaaacagactgggtattactctccagaaatatttccatctaccggtaaggactgcaacccgcagcccgctaactgcctgaaagatcaatacgtcttacgccattgctgcgtggatgatcggtcgggcaaaatgggttattccgtaaaatttcttgttttaacaaggatggacacggaaacggcctcattattccactgcaagccttgttatagcaagatgacttttaccatttatcacccgcttactcacagttttttcacttcttgctggtgattggtttaataaccatcaataaagtgatcacgcagtgaagtaataaggtgcaaaagtaaatataagcatagaaaaatgagtggcgcgaatcctgttggctaattagaatcgccaaccatgaaaacagagactccatccgtaaaaattgttgctatcaccgctgacgaagcggggcaacgtatcgataactttttgcgtacccaattgaaaggcgtaccaaaaagtatgatttaccgtattttgcgtaaaggcgaagtgcgggtgaacaaaaaacgtattaagcctgaatataaactcgaagcgggtgatgaggtgcgtattccaccggttcgcgttgctgagcgggaagaagaggcggtttcgccacatctgcaaaaggtggcggcgctggcggacgtcatcttatatgaagatgatcatatcctggtgctgaataaaccttccggtacggcggtacatggcggcagtggtttaagcttcggcgttatcgaaggtttgcgggcgttgcgcccggaagcgcggttccttgaactggttcatcgtctcgaccgggacacttcaggtgtgttgctggtagcgaaaaaacgctcggcgttgcgttctctgcatgagcaattacgtgaaaaaggaatgcaaaaagattacctggcgctggtgcgcggtcagtggcagtcgcatgtgaagagcgttcaagcgccgttactgaaaaatattctgcaaagcggcgaacgtatcgtgcgtgtcagtcaggaaggcaaaccgtcggaaacacgctttaaagtggaagagcgctatgcatttgccaccctggtgcgttgtagcccggtaaccggacgtactcatcagatccgtgtgcatacacagtatgcgggtcatccgattgcctttgacgatcgctacggtgaccgtgaatttgacagacagctcactgaagcaggcacgggattaaatcgtctgttcctgcacgccgcagcgttgaagtttacccatccggggaccggtgaggtgatgcgcatcgaagcgccgatggatgaaggtttgaagcgttgtttgcaaaagctgcgtaacgcgcgctaatacaagcatataagcctgataatgggcggttggcctgataaggcgtttacgccgcatcaggccgcctgcaccgattgccggatgcgacgtaaccgcatccggcgcaaacaactatcccatcagcgggtttttcccttcccgacgtaacatctgacacagcgcgattagcggtaaaccaaccagcgtgttagggtcacgtccctctaaacgctcaaacagcgtaatgccaaatccttcactcttaaagctacccgcgcagtgcaggggatgctccttacgcacgtaattatcaatctccgcctcgctcaggtgacggaaatggacgtcaaaaggctccacttctgtttgtagatgcccattcgccgaattaaacaacgccagtccagtatagaaggtgacgatattgccgctggctttgcgtaattgcagacgggcattttcttccgttaacggtttaccggtgatttcgccatcaagaacacatacctggtctgaaccaataattaaatgatccggataacgtgacgccagagattgcgctttttcttgtgccagtcgaagcaccaactgtcgcggtgattcgtcgctgcgtggggtttcgtcgacctctggtgctgcacattcaaaagagatttgcagtttttccagaagagcgcgacgccatggcgaggtggaggctaaaataagtttaggcatatttttttccatcagatatagcgtattgatgatagccattttaaactatgcgcttcgttttgcaggttgatgttcgttatcagcactgaacgaaaataaagcagtaacccgcaatgtgtgcgaattattggcaaaaggcaaccacaggctgcctttttctttgactctatgacgttacaaagttaatatgcgcgccctatgcaaaaggtaaaattacccctgactctcgatccggttcgtacggctcaaaaacgccttgattaccagggtatctatacccctgatcaggttgagcgcgtcgccgaatccgtagtcagtgtggacagtgatgtggaatgctccatgtcgttcgctatcgataaccaacgtctcgcagtgttaaacggcgatgcgaaggtgacggtaacgctcgagtgtcagcgttgcgggaagccgtttactcatcaggtctacacaacgtattgttttagtcctgtgcgttcagacgaacaggctgaagcactgccggaagcgtatgaaccgattgaggttaacgaattcggtgaaatcgatctgcttgcaatggttgaagatgaaatcatcctcgccttgccggtagttccggtgcatgattctgaacactgtgaagtgtccgaagcggacatggtctttggtgaactgcctgaagaagcgcaaaagccaaacccatttgccgtattagccagcttaaagcgtaagtaattggtgctccccgttggatcggggataaaccgtaattgaggagtaaggtccatggccgtacaacagaataaaccaacccgttccaaacgtggcatgcgtcgttcccatgacgcgctgaccgcagtcaccagcctgtctgtagacaaaacttctggtgaaaaacacctgcgtcaccacatcactgccgacggttactaccgcggccgcaaggtcatcgctaagtaatcacgcgtctgcgtgatgaagcttagtgaggattttccccaggcaactggggaaagaccaaaccgggcggcgacgataccttgacacgtctaaccctggcgttagatgtcatgggaggggattttggcccttccgtgacagtgcctgcagcattgcaggcactgaattctaattcgcaactcactcttcttttagtcggcaatcccgacgccatcacgccattacttgctaaagctgactttgaacaacgttcgcgtctgcagattattcctgcgcagtcagttatcgccagtgatgtccggccttcgcaagctatccgcgccagtcgtgggagttcaatgcgcgtggccctggagttggtgaaagaaggtcgagcgcaagcctgtgtcagtgccggtaataccggggcactgatggggctggcaaaattattactcaagcccctggaggggattgagcgtccggcgctggtgacggtattgccgcatcagcaaaagggcaaaacggtggttctcgatttaggggccaacgtcgattgtgacagcacaatgttggtgcaatttgccattatgggctcagtcctggctgaagaggtggtggaaattcccaatcctcgcgtggcgttgctcaatattggtgaagaagaagtaaagggtctcgacagtattcgggatgcctcagcggtgcttaaaacaatcccttctatcaattatatcggctatcttgaagccaatgagttgttaactggcaagacagatgtgctggtttgtgacggctttacaggaaatgtcacgttaaagacgatggaaggtgttgtcaggatgttcctttctctgctgaaatctcagggtgaagggaaaaaacggtcgtggtggctactgttattaaagcgttggctacaaaagagcctgacgaggcgattcagtcacctcaaccccgaccagtataacggcgcctgtctgttaggattgcgcggcacggtgataaaaagtcatggtgcagccaatcagcgagcttttgcggtcgcgattgaacaggcagtgcaggcggtgcagcgacaagttcctcagcgaattgccgctcgcctggaatctgtatacccagctggttttgagctgctggacggtggcaaaagcggaactctgcggtagcaggacgctgccagcgaactcgcagtttgcaagtgacggtatataaccgaaaagtgactgagcgtacatgtatacgaagattattggtactggcagctatctgcccgaacaagtgcggacaaacgccgatttggaaaaatggtggacacctctgacgagtggattgtcactcgtaccggtatccgcgaacgccacattgccgcgccaaacgaaaccgtttcaaccatgggctttgaagcggcgacacgcgcaattgagatggcgggcattgagaaagaccagattggcctgatcgttgtggcaacgacttctgctacgcacgctttcccgagcgcagcttgtcagattcaaagcatgctgggcattaaaggttgcccggcatttgacgttgcagcagcctgcgcaggtttcacctatgcattaagcgtagccgatcaatacgtgaaatctggggcggtgaagtatgctctggtcgtcggttccgatgtactggcgcgcacctgcgatccaaccgatcgtgggactattattatttttggcgatggcgcgggcgctgcggtgctggctgcctctgaagagccgggaatcatctccacccatctgcatgccgacggtagctatggtgagttgctgacgctgcctaatgctgaccgtgtgaatccagagaattcaattcatctgacgatggcgggcaacgaagtcttcaaggttgcggtaacggaactggcgcacatcgttgatgagacgctggcggcaaataatcttgaccgttctcaactggactggctggttccgcatcaggctaacctgcgtattatcagtgcaacggcgaaaaaactcggtatgtctatggacaatgtcgtggtgacgctggatcgccacggtaatacctctgcggcctctgtcccgtgcgcgctggatgaagctgtacgcgacgggcgcattaagccggggcagttggttctgcttgaagcctttggcggtggattcacctggggctccgcgctggttcgtttctaggataaggattaaaacatgacgcaatttgcatttgtgttccctggacagggttctcaaaccgttggaatgctggctgatatggcggcgagctatccaattgtcgaagaaacgtttgctgaagcttctgcggcgctgggctacgacctgtgggcgctgacccagcaggggccagctgaagaactgaataaaacctggcaaacccagccagcgctgttgactgcatctgttgcgctgtatcgcgtatggcagcagcagggcggtaaagcaccggcaatgatggccggtcacagcctgggggaatactccgcgctggtttgcgctggcgtgattgatttcgctgatgcggtgcgtctggttgagatgcgcggcaagttcatgcaagaagccgtaccagaaggcacgggcgctatggcggcaatcatcggtctggatgatgcgtctattgcgaaagcgtgtgaagaagctgcagaaggtcaggtcgtttctccggtaaactttaactctccgggacaggtggttattgccggtcataaagaggcggttgagcgtgctggcgctgcctgtaaagctgcgggcgcaaaacgcgcgctgccgttaccagtgagcgtaccgtctcactgtgcgctgatgaaaccagcagccgacaaactggcagtagaattagcgaaaatcacctttaacgcaccaacagttcctgttgtgaataacgttgatgtgaaatgcgaaaccaatggtgatgccattcgtgacgcactggtacgtcagttgtataacccggttcagtggacgaagtctgttgagtacatggcagcgcaaggcgtagaacatctctatgaagtcggcccgggcaaagtgctaactggcctgacgaaacgcattgtcgacaccctgaccgcctcggcgctgaacgaaccttcagcgatggcagcggcgttcgagctttaaaagaggaaaatcatgaattttgaaggaaaaatcgcactggtaaccggtgcaagccgcggaattggccgcgcaattgctgaaacgctcgcagcccgtggcgcgaaagttattggcactgcgaccagtgaaaatggcgctcaggcgatcagtgattatttaggtgctaacggcaaaggtctgatgttgaatgtgaccgacccggcatctatcgaatctgttctggaaaaaattcgcgcagaatttggtgaagtggatatcctggtcaataatgccggtatcactcgtgataacctgttaatgcgaatgaaagatgaagagtggaacgatattatcgaaaccaacctttcatctgttttccgtctgtcaaaagcggtaatgcgcgctatgatgaaaaagcgtcatggtcgtattatcactatcggttctgtggttggtaccatgggaaatggcggtcaggccaactacgctgcggcgaaagcgggcttgatcggcttcagtaaatcactggcgcgcgaagttgcgtcacgcggtattactgtaaacgttgttgctccgggctttattgaaacggacatgacacgtgcgctgagcgatgaccagcgtgcgggtatcctggcgcaggttcctgcgggtcgcctcggcggcgcacaggaaatcgccaacgcggttgcattcctggcatccgacgaagcagcttacatcacgggtgaaactttgcatgtgaacggcgggatgtacatggtctgaccgcgatttgcacaaaatgctcatgttgcgcgcagtctgcgtggttatgagtaataattagtgcaaaatgatttgcgttattggggggtaaggcctcaaaataacgtaaaatcgtggtaagacctgccgggatttagttgcaaatttttcaacattttatacactacgaaaaccatcgcgaaagcgagttttgataggaaatttaagagtatgagcactatcgaagaacgcgttaagaaaattatcggcgaacagctgggcgttaagcaggaagaagttaccaacaatgcttctttcgttgaagacctgggcgcggattctcttgacaccgttgagctggtaatggctctggaagaagagtttgatactgagattccggacgaagaagctgagaaaatcaccaccgttcaggctgccattgattacatcaacggccaccaggcgtaagtgaacatctccaggcggtcgttcgaccgcctgagttttatctttttgtcccactagaatcattttttccctccctggaggacaaacgtgtctaagcgtcgtgtagttgtgaccggactgggcatgttgtctcctgtcggcaataccgtagagtctacctggaaagctctgcttgccggtcagagtggcatcagcctaatcgaccatttcgatactagcgcctatgcaacgaaatttgctggcttagtaaaggattttaactgtgaggacattatctcgcgcaaagaacagcgcaagatggatgccttcattcaatatggaattgtcgctggcgttcaggccatgcaggattctggccttgaaataacggaagagaacgcaacccgcattggtgccgcaattggctccgggattggcggcctcggactgatcgaagaaaaccacacatctctgatgaacggtggtccacgtaagatcagcccattcttcgttccgtcaacgattgtgaacatggtggcaggtcatctgactatcatgtatggcctgcgtggcccaagcatctctatcgcgaccgcctgtacttccggcgtgcacaacattggtcatgctgcgcgtattatcgcgtatggcgatgctgacgtgatggttgcaggtggcgcagagaaagccagtacgccgctgggcgttggtggttttggcgcggcacgtgcattatctacccgcaatgataacccgcaagcggcgagccgcccgtgggataaagagcgtgatggcttcgtactgggcgatggtgccggtatgctggtacttgaagagtacgaacacgcgaaaaaacgcggtgcgaaaatttacgctgaactcgtcggctttggtatgagcagcgatgcttatcatatgacgtcaccgccagaaaatggcgcaggcgcagctctggcaatggcaaatgctctgcgtgatgcaggcattgaagcgagtcagattggctacgttaacgcgcacggtacttctacgccggctggcgataaagctgaagcgcaggcggtgaaaaccatcttcggtgaagctgcaagccgtgtgttggtaagctccacgaaatctatgaccggtcacctgttaggtgcggcgggtgcagtagaatctatctactccatcctggcgctgcgcgatcaggctgttccgccaaccatcaacctggataacccggatgaaggttgcgatctggatttcgtaccgcatgaagcacgtcaggtcagcggaatggaatacacgctgtgtaactccttcggcttcggtggcactaatggttctttgatctttaaaaagatctaagttgtcattttccacccatataaaaggtccgcttgcgggccttttttcttagcttttattccgacttgttccgtagtgaacatgctgccacactaacaattctctgataaggagccggtatgttcttaattaacggttataagcaggaatcgctggcagtaagcgatcgggcaacgcagtttggtgatggttgttttaccaccgccagagttatcgacggtaaagtcagtttgttatcggcgcatatccagcgactacaggatgcttgtcagcggttgatgattttctgtgacttctggcctcagcttgaacaagagatgaaaacgctggcagcagaacagcaaaatggtgtgctgaaagtcgtgatcagtcgcggtagtggcgggcgagggtacagcacattgaacagtggaccggcaacgcggattctctccgttacggtttatcctgcacattacgaccgtttgcataacgaagggatgacgttggcgctaagcccggtgcggctggggcgcaatcctcatcttgcaggtattaaacatcttaatcggcttgagcaagtattgatccgctctcatcttgagcagacaaacgctgatgaggcgctggtccttgacagcgaagggtgggttacggaatgctgtgcggctaatttgttctggcggaagggcaatgtagtttatacgccgcgactggatcaggcaggtgttaacggcattatgcgacaattctgtatccgtttgctggcacaatcctcttatcagcttgtcgaagtgcaagcctctctggaagaggcgttgcaggcagatgagatggttatttgtaatgcgttaatgccagtgatgcccgtacgtgcctgtggcgatgtctccttttcgtcagcaacgttatatgaatatttagccccactttgtgagcgcccgaattagtcatgaaaaaagtgttattgattatcttgttattgctggtggtactgggtatcgccgctggtgtgggcgtctggaaggttcgccatcttgccgacagcaaattgcttatcaaagaagagacgatatttaccctgaagccagggaccggacgtctggcgctcggtgaacagctttatgctgataagatcatcaatcgcccacgggtttttcaatggctgctgcgtatcgaaccggatctttctcactttaaagccgggacttaccgctttacaccgcagatgaccgtgcgcgagatgctgaaattgttggaaagcggtaaagaagcacagttcccgctgcgactggtagaagggatgcgtctgagcgactacctcaagcaattgcgtgaggctccgtatatcaagcacacgctgagtgacgataagtacgccaccgtagcgcaggcacttgaactggaaaacccggagtggattgaaggttggttctggccagacacctggatgtataccgccaataccaccgatgtcgcgttactcaagcgagcgcacaagaaaatggtgaaagcggtcgatagcgcctgggaagggcgtgcggacggtctgccttataaagataaaaatcagctggtgacgatggcatcaattatcgaaaaagaaaccgccgttgccagtgaacgcgatcaggttgcctcggtatttatcaaccgtttacgcattggtatgcgcctgcagaccgacccaaccgtgatttacgggatgggagagcgttataatggcaaactttctcgtgcagacctggaaacgccgacagcgtataacacctataccattaccggtttgccgccgggtgcgatagctacgccgggggcggattcgctgaaggctgctgcgcatccggcaaaaacgccgtatttctattttgtggccgatggtaaaggtggtcacacgtttaataccaatcttgccagccataacaagtctgtgcaggattatctgaaagtgcttaaggaaaaaaatgcgcagtaagtatatcgtcattgaggggctggaaggcgcaggcaaaactaccgcgcgtaatgtggtggttgagacgcttgagcaactgggtatccgcgacatggttttcactcgggaacctggcggtacgcaacttgccgaaaagttaagaagcctggtactggatatcaaatcggtaggcgatgaagtcattaccgataaagccgaagttctgatgttttatgccgcgcgcgttcaactggtagaaacggtcatcaaaccagctctggctaacggcacctgggtgattggcgatcgccacgatctctccactcaggcgtatcagggcggaggacgtggtattgaccaacatatgctggcaacactgcgtgatgctgttctcggggattttcgccccgacttaacgctctatctcgatgttaccccggaagttggcttaaaacgcgcgcgtgcgcgcggcgagctggatcgtattgagcaagagtctttcgatttctttaatcgcacccgcgcccgctatctggaactggctgcacaagataaaagtattcataccattgatgccacccagccgctggaggccgtgatggatgcaatccgcactaccgtgacccactgggttaaggagttggacgcatgagatggtatccatggttacgatctgatttcgaaaaactggtagccagctatcaggccggaagaggtcaccatgcgctactcattcaggcgttaccgggcatgggcgatgatgctttaatctacgccctgagccgttatttactctgccaacaaccgcagggccacaaaagttgcggtcactgtcgtggatgtcagttgatgcaggctggcacgcatcccgattactacaccctggctcccgaaaaagggaaaaatatgctgggcattgatgcggtacgtgaggtcaccgaaaagctgaatgagcacgcacgcctaggtggtgcgaaagttgtctgggtaaccgatgctgccttactgaccgacgccgcggctaacgcattgctgaaaacgcttgaagagccaccagcagaaacctggtttttcctggctacccgcgagcctgaacgtttactggcaacattacgtagtcgttgtcggttacattaccttgcgccgccgccggaacagtacgccgtgacctggctttcacgcgaagtgacaatgtcacaggatgcattacttgccgcattgcgcttaagcgccggttcgcctggcgcggcactggcgttgtttcagggagataactggcaggctcgtgaaacattgtgtcaggcgttggcatatagcgtgccatcgggcgactggtattcgctgctagcggcccttaatcatgaacaagctccggcgcgtttacactggctggcaacgttgctgatggatgcgctaaaacgccatcatggtgctgcgcaggtgaccaatgttgatgtgccgggcctggtcgccgaactggcaaaccatctttctccctcgcgcctgcaggctatactgggggatgtttgccacattcgtgaacagttaatgtctgttacaggcatcaaccgcgagcttctcatcaccgatcttttactgcgtattgagcattacctgcaaccgggcgttgtgctaccggttcctcatctttaagagagacatcatgtttttagtcgactcacactgccatctcgatggtctggattatgaatctttgcataaggacgtggatgacgttctggcgaaagccgccgcacgcgatgtgaaattttgtctggcagtcgccacaacattaccgggttatttacatatgcgggatctggtaggcgaacgtgacaacgtcgtattttcttgtggcgtgcatccactcaaccagaatgatccctacgatgtagaagatttacgccgtctggcggcagaagagggtgttgtagcgctgggtgaaaccgggctggattattattacacaccggaaactaaagtacgtcagcaagagtccttcatccatcatatccagattggtcgtgaactgaacaagccggttatcgtccatacccgtgacgcccgtgccgatacgctggcaattctgcgcgaagaaaaagtgacggattgcggtggcgtactacactgttttacagaggacagagaaacggcgggtaaattactggatctcggattttacatctccttttccggcattgtgaccttccgtaatgcggagcaactgcgcgatgctgcgcgttatgtccccctggatcgattactggtggaaactgactcaccttaccttgcgccggtaccgcatcgaggaaaagagaatcaacctgcgatggttcgtgacgttgcagaatacatggctgtgttgaaaggtgttgccgttgaagaactggcgcaggtaaccaccgataacttcgcccgtctgtttcacatcgacgcttcccgccttcaatccatccgttgaatgagtttttttaaagctcgtaattaatggctaaaacgagtaaagttcaccgccgaaaattgggcggtgaataaccacgtttgaaatattgtgacatatgttttgtcaaaatgtgcaacttctccaatgatctgaagttgaaacgtgatagccgtcaaacaaattggcactgaattattttactctgtgtaataaataaagggcgcttagatgccctgtacacggcgaggctctccccccttgccacgcgtgagaacgtaaaaaaagcacccatactcaggagcactctcaattatgtttaagaatgcatttgctaacctgcaaaaggtcggtaaatcgctgatgctgccggtatccgtactgcctatcgcaggtatcctgctgggcgtcggttccgcgaatttcagctggctgcccgccgttgtatcgcatgttatggcagaagcaggcggttccgtctttgcaaacatgccactgatttttgcgatcggtgtcgccctcggctttaccaataacgatggcgtatccgcgctggccgcagttgttgcctatggcatcatggttaaaaccatggccgtggttgcgccactggtactgcatttacctgctgaagaaatcgcctctaaacacctggcggatactggcgtactcggagggattatctccggtgcgatcgcagcgtacatgtttaaccgtttctaccgtattaagctgcctgagtatcttggcttctttgccggtaaacgctttgtgccgatcatttctggcctggctgccatctttactggcgttgtgctgtccttcatttggccgccgattggttctgcaatccagaccttctctcagtgggctgcttaccagaacccggtagttgcgtttggcatttacggtttcatcgaacgttgcctggtaccgtttggtctgcaccacatctggaacgtacctttccagatgcagattggtgaatacaccaacgcagcaggtcaggttttccacggcgacattccgcgttatatggcgggtgacccgactgcgggtaaactgtctggtggcttcctgttcaaaatgtacggtctgccagctgccgcaattgctatctggcactctgctaaaccagaaaaccgcgcgaaagtgggcggtattatgatctccgcggcgctgacctcgttcctgaccggtatcaccgagccgatcgagttctccttcatgttcgttgcgccgatcctgtacatcatccacgcgattctggcaggcctggcattcccaatctgtattcttctggggatgcgtgacggtacgtcgttctcgcacggtctgatcgacttcatcgttctgtctggtaacagcagcaaactgtggctgttcccgatcgtcggtatcggttatgcgattgtttactacaccatcttccgcgtgctgattaaagcactggatctgaaaacgccgggtcgtgaagacgcgactgaagatgcaaaagcgacaggtaccagcgaaatggcaccggctctggttgctgcatttggtggtaaagaaaacattactaacctcgacgcatgtattacccgtctgcgcgtcagcgttgctgatgtgtctaaagtggatcaggctggcctgaagaaactgggcgcagcgggcgtagtggttgctggttctggtgttcaggcgattttcggtactaaatccgataacctgaaaaccgagatggatgagtacatccgtaaccactaatccgtaagacgttggggagactaaggcagccagatggctgccttttttacaggtgttattcagaattgatacgtgccggtaatgctgaaattacgcggtgtgccgtagacgatagaaccttccacgttggtatcgtaggttttgtcgaacaggttattgacgttcccctgtaacgagaagtttttcgtcacctggtagcgggtgaagagatccaccagcgcgtagctaccttgctcggcgcggaaggtgccatacggtgtcacggtgtcggtatacacgcgattttgccagttaacaccaccgccgactgtcaactctggcatgacaggcaaccgatagctggtgaacattttaaccgtggtgcgtggcagattaggattaacggcgtttccttcgttatcctctgcaatatagcgcgttgcgccaaatgtcagctgccagttgtcggtaattgcgccgttgagttcaaattccacccctttactgactgtcccatccaccgctttataggcggtttcgccgttgctgccggggataggtgtaccggtggactgagcgacattatcctgctcaatacggaagatggctaacgtggtggtcagacggctattcatccagtccgatttcagacccagctcgtagttgttaccggtgattggagccagatatttgcctgaactgtcacgatcattttgcggctggaaaatagaggtatagctggcgtaggtcgaccagttgtcattgatgtcaaacaccagaccagcgtaaggcgtggtgtggtttttctccatgctgtaagtcagcgtatcaacccgccagttggtataacgtgcgccgaggatcagatgcagcggatcggcaagggtgactcgagtggcagcatataacgatttcatatgtgtggtatcgtcctgtgccaggctctgtggtgaccagtcggtttgtgggaaattgccattaaagttgtagaaactgccaatttcatccgggaagatgttggcccatgaactgaagtaacgattgttttgtttgctgtaactgccaccaaacattagattgtgctgacgaccaaacaattcataaataccgtcagcgaacaaatccagcgcatcaactttacgtttgccactgttccaaccggtgccgccgacataatcaaagccaggtccataattactgtatggcccaaccagcataccatccgctttgtttacataggcatcgacatacatcattttgctgtcaaattcgacttcagagtgggtggcattcagtgtcgcttgccaggtatcagcaaaccgctgcttcagggtcataaagaccttgttgatctctttatcgttgtacgcccagtcaggtgcggtactgcgtgcacgatcgtaactgttgctgctgccatcagtattccagcgcggtaaaccgccccaggtagggctattaacatcaatgcgctgatattcgtaaccggctgaaagcgtcgtaagatcgcctaaatcagcatcgacaatgcccgagaagaaggtcttttcactgttgtagcggtccagccatgagtcgttattctggtagccgccgacaattcgcgcgcggattttaccgtcttcggtgagtgggctttgtaaatccgccacataccgttctttgttccagctaccgtattccgccgagacatcgcctttaaattcacgactggtcgcgtgttttcgaaccatattaattgccgcagatggattacccgtcccggtcatgagtcctgtcgcgccacgcactacttctacgcgttcaaagagtgccatatcagaaagtgcgtcgcccagattccagcgcgattcaaaataggtggggataccatcaaccatatagttatcgatctggaatccgcgggaataataaagagcacgatcggaatccgcctgacttttgctgatccccagcgtgttttccatcacttcgcccagcgtttgtaactgctgatcttccatccgctgctggctaacaatagtgaccgactgaggaatatcacgttgagtcatctgcattttggtacccgcagaggtagacgttacgctgtaatcattttcgccatcatctggagctgtggctgaaccctcaacaatcaccgtttcttcagtggctggtgcagcaaaagcggcagaaggtaatagtgccagtgctatgcaaccggcaagtagtgacggtttggtgatggcttgatattgattatccctgttaaattgtgttgaaagcatttgaaatctcttggtttatgttgtcgtcaggctcatgccggaggagggtgatgagcgattatatttagtgtgcgaataactttgtttgtaaatgcaaatgagaaatatacgcattcatatttgtcgtgtaaaccaaacagagaatgtcttttcagcgcattcgcaggcagaaatgggaataatggcgatatatacggcagcaaaacgattttttgcttaagaaatcgtgagttaaggttgaaagagcaggtttaactcgaccatactctatactcgcagtgtggcgcggcgtagcatggcgcaacgcatggctatttgaaaaaggaaaatgtcgtggcagaagaaactatattcagcaaaattattcgtcgtgagatcccctccgatatcgtctaccaggatgatctggtaacggcgtttcgcgatatttcgccgcaagcgccaacgcatattctgatcattccgaatatcctcattccgactgtgaacgacgtctcagctgagcatgagcaggcgctgggacgcatgatcaccgtagcggcaaaaattgctgagcaagaaggtattgccgaagatggctatcgtctgatcatgaataccaaccgccatggcggacaagaggtttaccacatccatatgcacttgttgggtggccgtccgctgggaccaatgctggcgcataaaggtctgtaacgatgagaaaaggatgctttgggctggtgtctctggcgttgttactgctggtgggctgtcgttcacatccggaaattccggtgaatgatgagcaatcgctggtgatggagtcatctttattggctgcgggcatcagtgcagaaaagcccgtcctttcgacgtctgatattcaaccttcagcatcctcaacgctttataacgaaaggcaagaacccgttaccgttcattatcgtttttactggtatgacgccagagggctggagatgcatcctctggaaaggccacgcagcgttagcattcccgcacattcggcggtaacgctgtacggcagcgccaattttctgggggcgcacaaagtcagactttatctatatttgtaaggggtgaatcttgatgacaaaaatgagtcgctacgccttgattaccgcgctggcgatgtttctcgccgggtgtgtggggcaacgtgaacctgcaccggtagaagaagtgaaaccagcgccggaacaaccagccgagccacaacagcctgtccccacagtgccctcggtgccgacgatcccgcagcagccaggcccaattgagcacgaagatcaaacggcaccgcctgcgccgcatattcgccattatgactggaatggcgcaatgcagccgatggtcagtaagatgcttggggctgacggggtgactgcgggtagcgtcctgctggttgatagcgttaacaaccgtactaacggttcgctgaatgccgcagaagcgaccgaaacgctgcgaaatgcgctggctaataacgggaaatttaccctggtttccgcccagcagctgtcgatggctaagcaacagttaggtttgtcgccgcaggacagtttaggtacccgtagtaaagccataggcattgcccgcaatgtcggcgctcattacgtgctgtactccagcgcctctggcaacgttaacgctccgaccctacaaatgcagctgatgctggtgcagacgggcgaaattatctggtcaggtaaaggtgccgtttcgcagcaataatcccatcatgcgcgacgaattgctgtcgcgctttttcccgcagtttcatcccgtcacgacgtttaatagtgggcttagtggcgggagttttctcattgaacatcagggccagcgttttgttgtgcgtcagccgcacgatcctgatgcgccgcagtccgcgttcttgcgccagtatcgggctttatcacaactacccgcaagcattgcaccgaagccgcatttatatctccgtgactggatggtagtcgactatctgcccggcgcggtaaaaacgtatttgccggataccaacgaactggcaggcttgctgtattatctacatcaacaaccacgttttggctggcgaataacgctgttgccgttactggaactgtactggcagcaaagcgatccggcgcggcggacagtgggttggctgcgaatgttaaaacgtctgcgcaaagtgcgggaaccacggcctttacgcttaagtccattgcatatggatgtccacgccggaaatttagtgcatagcgcgtcagggttaaaactcatcgactgggagtatgccggagatggtgatatcgcgctggaactggcggcggtgtgggtggaaaatactgaacagcaccggcaattggtcaatgactatgccactcgcgcgaagatttatccggcgcaattatggcgtcaggtcaggcgatggtttccctggctgctgatgctcaaagcagggtggtttgagtaccgctggcgacaaaccggcgatcaacaatttatcaggctggccgatgacacctggcggcagctattaataaaacaataaggagagcagtgtgggtccagtaatgttggatgtcaaaggttacgaactggacgcggaagagcgtgaaatacttgcgcatccgctggtgggagggctgattctctttacgcgtaactatcatgatcctgcccagttacgtgaactggtgcgccagatccgcgcagcttcgcgcaatcatctggtggtggcggtagatcaggaaggtggacgcgtgcagcgttttcgtgaaggttttacccgcttgccagcggcgcaatcattcgctgcgctgtcaggaatggaagagggcggcaaactggcgcaagaggcgggttggctgatggccagcgaaatgatcgctatggatattgatatcagctttgcgccagtgctggatgtcgggcatatcagcgcggcgattggcgagcgttcttatcatgccgatccacaaaaagccctggcaattgccagccggtttattgatggtatgcatgaagccggaatgaaaacgaccgggaaacacttcccaggacacggtgcagtaacggcagactcacacaaagaaacaccgtgcgatccacgtccacaagcggagattcgcgctaaagatatgtcggtcttcagttccttaatccgcgaaaataaactcgacgccattatgcctgcgcatgtgatctacagtgatgttgatccgcgtccggcgagcggttctccctactggctgaaaaccgttttgcgtcaggaactgggttttgacggcgtgattttctctgacgatttatcgatggaaggtgccgcgattatgggcagttatgccgaacgcgggcaggcatcactggatgcgggttgcgatatgatcctggtctgcaataatcgtaaaggggccgtcagcgtgttagataatctgtcaccgatcaaggcagaacgtgttacacgtttgtatcataaaggttcattttcgcgacaggaactgatggactcggctcgctggaaagcgatcagcacccgtctgaatcagttacacgaacgctggcaggaagagaaagcaggtcactaaccctggcttatgtgaggaagcgatgattatctatttacacggttttgactctaacagtccgggtaaccacgagaaagtcttacaattgcagtttattgacccggatgtacgcttgataagctacagtacgcggcatccgaaacatgatatgcagcatctgcttaaagaagtggacaaaatgttgcaactgaacgttgacgagcgtccgctaatttgcggcgttggcctgggcggatactgggcggaacggattggttttctttgcgacatccgccaggtgatcttcaaccctaatttgttcccttatgagaacatggaaggcaagattgatcgcccggaagagtatgccgatattgccactaagtgtgtgaccaacttccgcgagaagaatcgcgatcgttgtctggttattttgtcgcgtaatgatgaagcacttaacagccagcggacatctgaagagttgcatcattattacgagattgtctgggacgaagagcagacgcacaaattcaagaatatctccccgcatttacagcgcattaaagcgttcaaaaccctcgggtaaatgccctcgtcgcatcaggtaaccttgccggtacctgatgcgctccgaattctgtaagtcggataaggcgtccacgccgcatccgacagtcgagcatcaatgcctgatgcgatgctgcgcatcttatcaggacgaccaaacgccctcgatatacgcttcaccctatattactcttccgaatttgctcaaataataaacaataaactctattttttgatctcacccggtaaagtcgcctatcttttcagcaacaaaacttgattaacatcaattttggtatgaccaatgcaccattcatgttattctcaatagcgaagaacattttcattgctgtaacctgttgttaattaagagctatgttaataaccattaattaacaattggttaataaatttaagggggtcacgttgactacgccattgaaaaagattgtgattgtcggcggcggtgctggtgggctggaaatggcaacacagctggggcataagctgggacgtaagaaaaaagccaaaattacgctggtcgatcgtaaccacagccacctgtggaaaccgctgctgcacgaagtggcgactggctcgcttgatgaaggcgtcgatgcgttgagctatctggcccatgcgcgcaatcatggtttccagttccagctgggttccgtcattgatattgatcgtgaagcgaaaacaatcactattgcagaactgcgcgatgagaaaggtgaactgctggttccggaacgtaaaatcgcctatgacaccctggtaatggcgctgggtagcacctctaacgatttcaatacgccaggtgtcaaagagaactgcattttcctcgataacccgcaccaggcgcgtcgctttcaccaggagatgctgaatctcttcctgaaatactccgccaacctgggcgcaaatggcaaagtgaacattgcgattgtcggcggcggcgcgacgggtgtagaactctccgctgaattgcacaacgcggtcaagcaactgcacagctacggttacaaaggcctgaccaacgaagccctgaacgtaacgctggtagaagcgggagaacgtattttgcctgcattaccgccacgtatctctgctgcggcccacaacgagctaacgaaacttggcgttcgcgtgctgacgcaaaccatggtcaccagtgctgatgaaggcggcctgcacactaaagatggcgaatatattgaggctgatctgatggtgtgggcagccgggatcaaagcgccagacttcctgaaagatatcggtggtcttgaaactaaccgtatcaaccagctggtggtggaaccgacgctgcaaaccacccgcgatccagacatttacgctattggcgactgcgcgtcatgcccgcgtccggaagggggctttgttccgccgcgtgctcaggctgcacaccagatggcgacttgcgcaatgaacaacatactggcgcagatgaacggtaagccgctgaaaaattatcagtataaagatcatggttcgctggtatcgctgtcgaacttctccaccgtcggtagcctgatgggtaacctgacgcgcggctcaatgatgattgaaggacgaattgcgcgctttgtatatatctcgctataccgaatgcatcagattgcgctgcatggttactttaaaaccggattaatgatgctggtggggagtattaaccgcgttatccgtccgcgtttgaagttgcattaatcgacgtacactggcggatgtggcataaacgccttatccgcccttgaggaacagcgcgatcggcagccgcgtcgcatcaggcattccttcagactcctccgaatccttaagtatttccagccattcccgcgcttttcatcttctgtctgatagctgcttttctccttcgcttgcatgattggcataactgcaaagaaggaggtgttcccgtgaataaatcaatgttggcgggtatcgggattggtgtcgcagctgcgctgggcgtagcggcagtggccagtctgaacgtgtttgaacggggcccgcaatacgctcaggttgtttctgcaaccccaatcaaggaaacggttaaaacaccgcgtcaggagtgtcgcaacgtcacagtgacccatcgtcgaccggtgcaggatgaaaatcgcattaccgggtcggtgctcggcgctgttgctggcggcgtgatagggcatcagtttggcggtggtcgcggtaaagatgtcgccactgttgtgggggcgctgggtggtggatatgccggtaaccagatccagggctctctccaggaaagcgatacttacacgactacgcaacagcgttgtaaaacggtgtatgacaagtcagaaaaaatgctcggttatgatgtgacctataagattggcgatcagcagggcaaaatccgcatggaccgcgatccgggtacgcagatcccgctagatagtaatgggcaactgattttgaataacaaagtataacaaggctgtactctgcaatttggcccctcattcgctcaggctgaggggctttttttgcgacttatttcaccagttcgggccataaacgcaaagtcgttccggcaatctgcattagtttttccagcgatgcaccttcgcgtgcgctgatcgacatcccctgaataatacaattaaggaattctgccagatgtgtcacgtcacagtgggtcgggatttccccgcgcgcttgtcgttgacataaaaactgctgcaaagtgcgctcttgcatcgcatggcgtgatttcaacgtattggcgatatctcctgaatctggggagagggtggtgcagttgttgatcatgaagcagcctgccggggtgtctttgctggtaaagcagttggcgatggcagcaaaatagtcagccagcgcagactccacgcttttctcttcacaaaacagctgtgcttcatgcttagcggcaaaacgatcgatatagcggtcgagaacggcacgaaataacccctctttgttggtaaattccgcgtatagcgtgggcgctttggctccggtcgcttcgacgaggtccgcaagagaagtcgcttcataaccgtgttgccagaacaatttcatggccttatcaagcgcggcatccctgtcgaacacttttgggcggccacggcttttttttacacattgtgttgagtcagttgccatgatgccgttgtacctggtgactgtgaatgaaaggttattataaaaataatcacctccgttcaccagtccagatccccataaaaataattgctttctatttaactgaaatttaaagatttttaaattaattaatgattgttataaaaaatatcttgtatgtgatccagatcacatctatcatttagttatcgatcgttaagtaattgcttgcgacgtcattcatctgcataaggccactattatgaaaaacgtaaaaaccctcatcgctgcggcgattttaagctccatgtcatttgccagctttgcggctgtcgaagttcagtcaacgccagaaggccaacaaaaagtcggtacaatcagtgctaacgcggggacaaatctgggatcgctggaagagcagctggcgcaaaaagcggatgagatgggcgcaaaatctttccgtattacttctgtaaccggtccgaataccctccatggaacagcagtaatttataaataagcattaaccctcattaatgcctgctactgctgattttttccccgcgacatgccgtgtcgcggggatttttttatccaggatttacagagtttgtgggctcacttgatgacggcggacatccaccggcatcccggaacggacatccatcacatgttgcatcacttcagcgtcagtttgtgctgcatctttaaatgattgcattgcgctattcagcgtaattggcagcagctgcggatcgtcatcaatcttctctgacagcggctgatgtacttcaaccagacgcgcaccgtttggttcggcagagacttttatcggagtgttgatgatattcactttggtgcctggggtgacctggctaaagagtgttttgatatcgtcatcccgcagacgaatacagccagaacttacccgcatgccaatgccgaaatcggcgttcgtaccgtgaagcaaataaacgccgccataggccgccagacgaatcgcatgatggcccattgggttatccggtccagccggcactaccgcaggcaactcaattccctgtgctttataacgggcgcggatgtttgccgttggcgtccaggttgggtttgcacgtttgtctgaaacggtggtcaccattgtcggtgtcagcgtgtcaccacctaactgaccaatacctattggatacacggttaccgaatttttacccggcgggtagtaatagagacgcagctccgcaatgttgatcacaatgccttcgcgcggcgcgtctggaagtagggtttgcaacgggatcgttaacacgctgcccgcgcgcggtacgtaaggatcaacgccggggttagcctgtaacagagcgagaaagccgacgttatattttttggcgatggcttccagagaaccaccgtcattttccaccacatgaaatttgttttcgccaaccagacgactgcccgctggcggcagcggccaggtgttggcttttgccggtagcgccagcgccacggcagcggcgaacgtaaaaaacgttagccagcgagaaaaacgcgttttgatcatcaccaaaaatccataataaatataaggttattgtaataaacagataagcctgaattatggatggtgacagtgtcggatagtgcagggaagtgcaaagaatttgtaaatgttgcagatgggggcgcagaaacgcccccgatttaccattaagcgatcgcgttctcttccagttcacgcataaactggcgtacccattcgatacgcgttttccgctcactcaaatcctgaataaatttcaggcgcgtcggaccatcaaggcggtaatgctgcggctgtttttgcagcaaaccaatcaaccaggccggattaacgtgattcttctcggcaaattcgatcaccccgcctttctcattaccttccagcttcctgatccccagtttctgcgcttgctggcgcagacgggcaacatccagcagggtacgcgccggatccggcagcaggccgaagcgatcgataagctcgactttgatctcttccagttcgttttccgttttggcgctggcaatacgtttatagaacgacaaacgcgtattcacgtcaggaatgaaatcatctggcaatagcgacggcatccgcagctcgacttctgtttgctggctggtgagatcttccagcgacggctcgcgtccggctttcagtgcatcgacggcgttttccagcaactccatatacagcgagaaaccgatggtttccattgagccgctttgttcttcgccaagcagttcacccgcgccgcgaatctccagatcgtgcgttgccagcgcaaaacctgccccgagatcttccagcgaggcaatcgcttcaagacgtttttgtgcatcggtagtcatcgcttttggatgcggcgtcagcaaccatgcatatgcctgatgatgcgaacgtccgacgcgaccgcgtaactggtgcagctgcgccagaccgaagtgatccgcacgttcaatgataatggtgttggctgtcgggatgtcgatcccggtttcgataatggtggtacaaaccagcacgttgaaacgttgatgatggaaatcattcatcacccgttccagttcgcgctcgcgcatctgcccgtgaccgatggcgatccgcgcttctggcaccagttctgccagccgttcggcggctttctgaatgttttccacatcattgtagagataataaacctgtcctccgcgcaaaatttcacgcaggatcgcctcccggaccaccaggctgtcatactcacggacaaaggttttaactgccagacgacgggcgggcggcgtggcgataatcgacaggtcacgcattccgctcattgccatattcagcgtacgtgggatcggcgttgcagtaagcgtcagaatatccacgttcgcgcgcatcgctttaatacgctctttatgacgcaccccgaagcggtgttcttcatcgacaatcagcaggcctaaatctttaaacttgacgtcactttgcagcagtttgtgcgtaccgatcagaatatcgattttcccttccgccacttccgcaaggatttgcgtctgctctttggcgctgcggaaacgggagatcatttcgatacgtaccggccagttggcgaaacggtcgcggaagttgtcgtaatgctgctgcgcgagaagggtggtaggcaccaacaccgccacctgcttgtggttatctactgccaggaaagcggcgcgcatcgccacttctgttttaccaaagccaacatcgccgcacaccagacgatccattgccagcggctgacacatgtcgctaagtaccgcattaatggcctgcgcctgatccggcgtggtttcaaacgggaagctgtcgcagaacaactgatactgctcacgatcgtgtttaaacgcgaagccctctttggcggcgcgttgcgcgtagatatccagcaattccgccgccacatcacgcactttttccgccgctttctgccgcgcgcgtgaccacgcatcgccgccaagtttatgcagcggggcgttttcttccgcgccacctgcgtaacggctaatcagatgcagtgacgacaccggaacatacagtttggcgtcgttggcataggtgagcatcaaatactcgccagtaatgccgcccgcttcgagcgtggtcattccggcatagcgcccgacaccgtgctccagatggaccaccggctgaccaatatgcagctccgcaaggttacggatcagtgtatcggggttgatggtgcggcgagaatcctgacgacggcgggcaacacgttcaccgagcagatcgctttcgcagatcagcgccagattacgcaccttatcgacaaaaccatgttcggcagcgccaatcatcagataacgcccacggtcgctggcttcatcaagacgcataatgcgttgcggagcaattttaattcgtgcgagcagttcacccagcgcttcacggcgaccttcactttctaccgagaacaccaccggaccgtcgaaagtctcgaggaacttacgcagcgcatccagcggcgctttttgttgtgcctgaacggccaggtctggcagtttctggaaacctaaattggcattcgcggcttttgtcggtaaatgttcagtttttagctgcacccggggccagtttttcagctctgagaagagctcgtccacccgcagccagagcgattgtggtggcaacagcgggcgcatcggatcgacgccgcgattctcaaaacgcgccagcgtgtcagcctggaaacgttcggcactggtttccagatcgccagtattcaccagcaaggtattggcagggaaataactgaacagcggcggcagtggttcgctgaagaacaatggctgccagtactcgatcccggcaggtaatgtgcctttactcacttgctggtaaatatgttccggatcgcgcttcacttcgaaggtatcgcgccactggctgcggaacagttcaattgccgctttatcggtcggaaattcgtgcgcgggcagcagattgatcgcttctacttcctccagcgtgcgctggctgtcgacgtcaaacacccgcaggctgtcgatttcatcatcaaagaaatcaagacgataaggcagctcactccccatcgggaagagatccagcaacgcgccgcgcgtggcgtattcgccgtgctccatcacctggtcaacatggcgataaccggcgctgtccagttgggttcgtaatgcatctcgtgacaggcgctgaccttttttcatcaccagcgcatgaccgtggagaaaactgtgtgggcaaacgcgctgcataagcgtattcaccggaacaatcagtacgccacgctgcatcgtcggtagctggtaaagggtggaaaggcgcgaggagataatgtcctgatgaggcgaaaaactgtcgtagggaagagtttcccagtccgccagattcatcaccatctgatcggtgaactggctgatttcatcatgcaaacgcagagcattttgcatatctggtgcaatgagtaccaccggaccggcgtgacgttcggcaatttccgctaccagcgttgcacaggctgcgccggttaactcgcccagcagacgctgctcacccgctttgacgggcagcgtataacgatattgttcaggcataacggttgtcagattctcgttaggatatgcctcaacatatgggggcatatctctgataagcaatgctgttcattatccgtaatcgacatggtttagcaaattgaatcgccccggctggggcgatggcttagcgggagtaactgacggcagcgggcagtgaaggcggggagaacaacagatcgctgaatgcacgctgtgaaagttttcttaccagcaagcccgcaacagtacagatgaacaaactgacaaagggataaaccagcaggagtgtcagttcgacttgcggcgaccagcgtgctgcgttcatttgcgcaagcagagttaagctgaatatttcaaccagaatgcgatgggtggtgtagatagcaatggtgttggagccaatcacattcagcaggctggtggagcgcataccgaatcgttgctcgtattgataaaacagcttcatgatcaccacaatcgataccagcgacaacagcagcgagatagtaaacaaccaggcaccgaccgccagaacggtaagcaaagaagccatcagcagatggcggcgcaacggcacctctttaacacaggtcattattgttgcgccaaaccatgcgccaaggctgtaataaggcaaattgcggatcacactgttcattccccaccacggcgtgggaacgaaattaaccgccacactcaacagtacaaacaaggcgaatagtggcagcgccagacggctaaaaattttacataccacgaaatagacaattaacgcatacagataccacaagctggtgctggcggtgatcatcccgtgcaggaactcaccggtggaatcggcataagcggcattggaggcattgcttaaatcgcgctcaggtgccagccattggttcagcgcacttaacgccagccactgcaccacgccccaaagcgccagcacccagaagatgttccagatccgtttatcgagacaatttccccacggtacgctgtcgatatagcggcgaatcaaatagccggaaataaagaaaaaaaccggcatacgaaagggggcaaggtaaagattgaaatagatccagcatttgctcaggacttccgataacggatgctgaaaagtggtcagatgcggataaaaggtaatgaccgagtgataaatcaccaccagacaaatacataaccctttgatctggttaatccatagctctttttgtttcatcaggacaacacgctcttttttaatttacatgcggttgatcctgcgggttatgacccgaggtgtaatgggtatctgtctgtattggatgatttttcagattaagatcaggcggcaagattgatgataaaacatggcaatttagccgattgatttacgggggcttttcagattagccctgacgatcacttacagttcagacgtttacccatcttgctttcgcttatatactcgtgtctttgctacagcaaccagacggatttcatgtaccaacctgtcgctctatttattggcctgcgttacatgcgtgggcgtgcagcggatcgcttcggtcgtttcgtctcctggctttctaccatcggcattaccctcggggtgatggcgctggtcacagtattgtcagtgatgaacggctttgagcgcgagctgcaaaacaacatccttggcctgatgccacaggcaattctctcttctgagcatggctctcttaacccgcagcaactcccggaaacggcagtcaaactggacggcgttaatcgcgtcgcacctattactaccggtgatgtggtgctgcaaagcgcgcgcagcgtggcggtcggggtgatgctcggtatcgacccggcgcaaaaagatccacttacaccgtatctggtcaatgtgaaacaaactgacctcgagccggggaaatataatgtcatcctcggcgaacaacttgcctcacagctaggcgttaatcgcggtgatcaaatccgcgtgatggtaccatctgccagccagttcacgccgatggggcgtattccaagccagcgcctgttcaatgtgattggcactttcgccgccaacagtgaagtcgatggctatgaaatgctggtgaatattgaggatgcctcgcgtctgatgcgttatccggcaggcaatattaccggctggcgtttgtggctggatgagccgctgaaagttgactctttaagtcagcaaaaactgcctgaaggcagcaaatggcaggactggcgtgaccgtaaaggcgagctgttccaggccgtacgcatggaaaaaaatatgatgggcttgctgctgagcctgattgtcgccgttgcggcgtttaacattattacctcactagggctgatggtaatggagaagcagggcgaagtcgcgatcctgcaaacgcaaggcttaactccgcgacaaatcatgatggtctttatggtgcaaggggccagcgccgggattatcggtgcgatcctcggtgcggcgcttggcgcactgcttgccagccagttaaataatctgatgccgataatcggcgtcctgcttgatggcgcggcgctgccggtggctatcgaacctttacaggtcattgttattgcgctggtggcgatggctatcgcgctgctgtctacgctttacccttcatggcgcgctgccgccacacaacccgctgaggctttacgttatgaataagatcctgttgcaatgcgacaacctgtgcaaacgctatcaggaaggcagtgtgcaaaccgatgtactgcacaatgtcagtttcagcgtgggcgaaggtgaaatgatggcgatcgtcggtagctctggttccggtaaaagtaccttgctgcacctgctgggcgggctggatacaccaacctccggcgatgtgatctttaacggtcaaccgatgagcaaactgtcttcggcggcgaaagcagaactgcgcaaccagaagctgggctttatttatcagtttcaccacctgctgccggattttactgccctggaaacgtggctatgccactgctgattggcaagaaaaagcccgctgaaatcaacagccgtgcgctggagatgttaaaagcggtggggctggagcatcgtgcgaatcaccgcccatctgaactttctggcggcgaacgccagcgtgtggcgattgcccgtgcgctggtcaataatccgcgtctggtacttgcggatgagcctaccggtaacctcgatgcgcgtaacgccgacagcatcttccagttgcttggggaattgaatcgcttgcagggcaccgccttcctggtggttactcacgacctgcaactggcgaaacgtatgagccgccaattggaaatgcgtgatggacgtctgacggcggaactgagcctgatgggggcggagtaatggcgatgcctttatcgttattgattggcctgcgttttagtcgcggacggcggcgcggcggcatggtgtcgctgatctccgttatttctaccattggcattgccctcggcgtggcggtattgatcgtcggcttaagcgcgatgaacggctttgaacgcgaactgaataaccgtattctggcggtggtgccgcatggtgaaattgaggcggtaaatcagccatggactaactggcaggaagcactggataacgtgcaaaaagtgccgggtattgccgctgctgcgccgtatatcaatttcaccggactggtagaaagtggtgccaatctgcgcgcaattcaggtgaagggcgttaacccgcaacaggaacagcgtctgagcgcattaccctcgtttgttcagggggatgcctggcgcaattttaaagcgggcgaacagcaaattatcatcggcaaaggcgtggcggatgcgctgaaagtgaagcagggcgattgggtgtcgatcatgatccccaactcgaatcccgagcataaactgatgcagccaaaacgtgtgcgtttgcacattgccggtattttgcagttgagtggtcaactcgatcacagttttgccatgatcccgctggcggatgcccaacaatatcttgatatgggttccagcgtgtcaggtattgcccttaaaatgacggatgttttcaacgccaataagctggtacgcgatgcgggtgaagtgaccaacagctatgtttatattaaaagttggattggtacttacggctatatgtatcgcgatatccagatgatccgcgccattatgtatctggcgatggtactggtgattggcgtggcctgtttcaacatcgtctccaccttagtgatggcggtgaaagacaagagtggcgatatcgcagtattaagaacgctgggggcgaaagatggtttaattcgcgccatctttgtctggtatggattgctggcagggctgttcggcagcctgtgtggggtgattatcggtgtggtggtttcactgcaacttaccccgattattgagtggattgaaaagttgatcggtcatcagttcctctccagcgatatctattttattgatttcctgccatcggaattgcactggctggacgtcttctacgtactggtcacagcattgttgctgagtcttttggcaagttggtatccggcgcggcgcgccagtaatattgaccctgcgcgagtccttagcggccagtaaaggcagtacattaaaacaaggagcggcaatgtattacgggtttgatattggtggaacaaaaattgcgcttggcgtgtttgatagcggtcggcagttgcagtgggaaaagcgggtgccgacaccgcgtgacagctatgacgcatttttagatgcagtgtgtgagctggtagctgaagctgaccaacgttttggctgtaaaggttctgtcggcatcggtattccgggaatgccggaaacagaagatggtacgctgtatgccgccaatgtccccgctgccagcggtaaaccgctgcgtgccgacctgagcgcacgtcttgatcgcgatgtacgccttgataacgatgccaactgttttgccctttcagaagcctgggatgatgaatttactcaatatccactggtgatggggttgattctcggcaccggcgttggcggcgggctgattttcaacggcaaaccgattaccggtaaaagctacattaccggcgagtttggccatatgcgtctgccggttgatgcgttaaccatgatggggttggatttcccgttacgccgctgcggctgtggtcagcatggctgcattgaaaattatctgtctggtcgcggttttgcgtggctgtatcaacactattatcatcaaccgttgcaggctcccgaaattattgcgctttatgatcaaggcgatgagcaggcaagggcgcacgttgagcgttatctggatttattagcggtttgtctgggaaatatcctgaccattgttgaccctgacctggtcgtcattggtggtggcttatcgaatttcccggcaatcacaacgcaactggcggacaggctgcctcgtcatctcttacctgtagctcgtgttccgcgcattgaacgcgcgcgccacggtgatgcgggaggaatgcgtggtgcggccttcctacatctaaccgattaaacaacagaggttgctatgctgtcgcgtcggggtcatcggttaagtcgttttcgtaaaaataaacgccgcctgcgcgagcgtttgcgtcagcgtatttttttcagagataaagtggtgccggaagcaatggaaaaccaagagtactcgtactgacaggggcagggatttctgcggaatcaggtattcgtacctttcgcgccgcagatggcctgtgggaagaacatcgggttgaagatgtggcaacgccggaaggtttcgatcgcgatcctgaactggtgcaagcgttttataacgcccgtcgtcgacagctgcagcagccagaaattcagcctaacgccgcgcatcttgcgctggctaaactgcaagacgccctcggcgatcgctttttgctggtaacgcagaatatagacaacctgcatgaacgcgcaggtaataccaatgtcattcatatgcatggggaattgctgaaagttcgttgttcgcaaagtggtcaggttctcgactggaccggagacgttacgccagaagataaatgccattgttgccagttcccggcacccttgcgcccgcacgtcgtttggtttggcgaaatgccactcggcatggatgaaatttatatggcgttgtcgatggctgatattttcattgccattggtacttccgggcatgtttatccggcggctgggtttgttcacgaagcgaaactgcatggcgcgcacaccgtggaactgaatctcgaaccaagtcaggtcggtaatgaatttgccgagaaatattacggcccggcaagccaggtggtgcctgagtttgttgaaaagttgctgaagggattataaagcaggaagcattgcctgatgcgctacgcttatcaggcctacaaggggacgcaattaattgaatttgcgggttttgtgggccggataaggcgttcgcgccccatccggcataatacacgcgcacttttccggcctcttttatcgtttactcgtcaataacaatgcggcaataaacgtacagacaccaattagccctgcccagagtggcgatattctggtaatcgcaaagctattatcgatatacaaacataaagcctgataacccatattggcaatagtcatcgccactgcaaattttaacgcataaataaaacgagtcgtgtagcaaaagatccaggaaaataagataaacgtcgcagcccaggcgataaaacctaatgtgttggtgctgccggggggagcattttcatgctgttgtcctggatgcggataatacgtcagtggcggcgtcggttgttttaatatctgtgcttgtagaacagccaatgcattattgattccctgataccagagatctgcatttaaataagccagcgtgtgattttctatcagaaggccgagatgtttatcgtccagaccactttcaacctggccgttggtgatcataattaaccgtggttcgcgggtagtaaatagtaacagaacacttccttttacattactcaatgaagatgacgcatgcgccagcatcgctttaccattttgtctgagactgccttcattattaatgtcgggtaaaatcacaataaacggtgcaattcccgtttgttggcgaaaaagctcggctttacgtgcgatctcttcagcatccggtacagtaccggtaacatccgtaaaaagtgtcttcattattggaatcaatggtttactggttgctaccagaggcaggagtatcagtaaactgagcagtataatgaatttttttatgggcgggacttccgtttcctgcgagattttttggtggaggggagcgtgattatcagaccgacactaccgaaaataatgcctgctatgccaacaaagccccatttaaaaaaattaacccagggattgtttatttcggcttgttctggatgccctggcggataatagacattgactctgtcaccttcgctatcttcataaaaatcactaccgatattcgaattgaaaattagcgtgtaatctggcgtagggcgaaaggcaaccactggataccaggaaccattatcatcgacgtcgtttgagtgattgttgtaccaaacggcatcaacaatgattccttctgtatgaaccgcgcttttggtaaaagtaaaatggtaataaaagatgattgcagaaataacgagcaatatcagaccgataccgagaaaagcgcgggataaaactttactgtcctgactcattagccacatccttgctaactaaaaaacgggcggtaataccaccgcccgtttgctgaattaacgtcctgctttcagcttctgataatactcttcataaatgctgctggctgcgccaacgtcattctgccattcaccatttttaatggtttcagcatccgggtagagcgttttatcgttcgccacttccgggcttaacagcttacgcgccgcaaggtttggcgttggataaccgatagtttcggcaacctgttttgccacatccgggcgcagcaggaagttgatcaatttcagcgcgccttctttgtttttggcatttgccgggatcgccaggctgtccatccagaaaatgccgccttctttcggccacaccacgtcaattggcgtacccgcctggcgtgcaacgaaagcagagccgttccagatcatgccgaggttaacttcgccttccatgtacgggttagccgggttatcggagttaaacgctgcgacgtttggcatcagttttttcagctcgttatatgcagcttcaatctctttcggatcggtagtgttaccggagtagcccagtttgcgcagcgccatctggaacacttcacgggcatcgtcggtcagcagcaggctacctttgtactcaggcttccacagatcggcccagctggtaacggatttcggatctaccgcatcaccgttaacgccaatcgccgtcgccccccagatatacggaatggagtagtcgttattcgggtcaaacggcttgttgagcatgtctggatcgaggttgctgaaattgcttaacttcgacttgtcgatcttctggatcatcccttctttacgcattttatcgacgtaataggttgaaggaaccaccaggtcgtaggcaccgtctttgtacgttttcaacttggcgtacatggtttcgttcgactcgtaagtcgaatagataaccttaataccggtttctttggtgaactgttcaagcagtcctggcggcacgtactcggtccagttgtagaaatacagcgtattgttgtcatcggcgtgagcggcgctcatgcccagtgccagagcacccgccgcgagcaggtggcgtgaccattttttcatttaacgtcccctgtgttacctttcgttttatcacgagcaataagctggctggcaattaccatcaccagcgacagcaccagtaatatggttgccagcgcgttaacttccggcgatacgccgactttgaccatcgaataaatttttaacggcagaatttcatagcttggtccggtgacgaacgaagaaactactacatcgtccatcgacagggtaaagcttaacacccagcccgccgccaccgcaggcattgccagtggcagaatgatttttcgcagaatggtaaattcactggcaccgagatctttcgccgcttccagcatccgcacgtcaaaacctttcaggcgcgaatacaccgtcaccaccacaaacggcaggcagaaggtgatatgcgagaacagcagcgaccagaagccaagctgaatacccagcagcataaacagcaccagcagagaaatcgccatcacgatatctggtgacatcatcaccacaaacagcattccgctaacgaacggcttaccacgaaagcgataacggtacagcgcaactgccgtcagtgaaccgataagcgtagcaaatgtcgccgaaaacaccgccattgttagtgaatgctgcgctgcctgtaacaggctgtcgttgttcatcagcaggctataccatttggtggtaaaaccctgccagttgatgccaaagcgcgagctgttaaaggagttcacaatcaaaataatgattgggatatacaggtacgcgtagatagcggtcataaaaccgccgcgaagcagtcgaccgatcattcgagttccacctttttattcagcagacgagaagcgcgccagtaaaccagcaacatcaggcccattacgatagtcagcgtaatgctggtggctgcaccaaacggccagtcacgaatattgaggaactggaccttgatgacgttaccgatcagcaggtttttcgcaccgcccatcaggtcggatacatagaacaggcccatcgctggcagcatcaccagcagacatccggcaataattcccggcatcgtcagtggaataatgatacggataaaagtctgtaacttgctggcaccgagatcgcgcgccgcctcaagcaacggcttatccagtttttcgatactggagtacagcggcatcaccataaacggtagcagaatgtaaaccagaccgataatcaccgcactgggcgtgaacatgatacgaattggtgtgtcgataacgcccagccagagcaaaaactcgttgagatagcctttggtgctgaggaaaattttcagcccgtagatgcgaatcagtgagttggtccagaagggaacaatcagcagaaacagcagcagcggacgcaccttgtgtggtagcttcgccagaaaccaggcaaacgggtagcccagcaccaggcaggcgagggtggcgatcagcgccatattcagcgagtgcaatagcacttcaaaatagagcggatcgagcagacgcgtgtagttatccagcgtaaagaccattttgacgaaactggcgtcgtcgcgggtcaaaaagctggtgccaatgatcatcaggttgggcagaaagacaaacaacacaagccaaccgacaatagtgacaatcactacattctggaacttacttgtgttcttcatcagccagtacgacctcccagctttctacccaattaatggccattttttggtcgagagagtggtcaaagtcagggtcgtcttcattgaagaattcgctgaccatcaccatcttgccattttccagttcaacaaccgactccagcgtcatgcctttgtagttacgctcacgaacgtaaccaatcagcccttcagcgtggttgtcgtcgttaatctcttcaacacgtaagtcttccgggcgcagcagaacatgcagtttttgccccggttcaacggcgaagttaacgtagatattacattcgcggccttcaacgttggcgcgtacgcgctgctcgtcgagtcgctcgatcaccgtggcgttaaacatattaatttcgccaatgaacccggcaacaaacaggtttttcggctcttcgtagatttcacgcggcgtgccgtcttgctcaatgcgaccatcgcgcatcaccacaatcctgtctgacatggtgagtgcttcttcctggtcgtgagtcacgaagacgaatgtaatgccaagcttacgctgtaacgctttcagctcattctgcatttgcttgcgcagtttgtaatccagcgctgagagcgactcatccagcaacaacagacgaggcttgttaaccaccgcgcgggcaatggcgacgcgttgctgttgaccaccagagagctgatgcggtttacgttgagcgaaggtttccagttgcaccatccgcagggcttccatcacgcggggcgtaatttcagcagcgggggttttttgcatgcgcaacccaaaggccacattttcgaacacggtcatgtgggggaaaagtgcgtagctttggaaaacagtgttcacatagcggttttccgccggaacgtgggtgatgtcctcgttatccagcatgatgcgtccggaatcaacagtttccagacctgcaatcaggcgaagaacggttgttttaccgcagccagaagggccaagcagcgtgaggaactcgccattgttgatagtcagatccagctggggaatgacctctttaccatcaaagcatttgcgaattcccgccaattgcaccagcggtgaaagcgaactcggttgtttattcaattttttactctgtcccatgtaaacgcaacggatggcttaccgatgcggggtttgtggttaaccaccttggtgactcttaatgagggcggtaattctacggcaaaccgcttgaatcgccaatctttgttgtgaattactggcttagctttatattcattaaggtaatgctgataaatattcccgcttgcaggggtaaaagtgacctgacgcaatatttgtcttttcttgcttcttaataatgttgtcacaaaaagtgagggtgactacatggataaactacttgagcgatttttgaactacgtgtctctggatacccaatcaaaagcaggggtgagacaggttcccagcacggaaggccaatggaagttattgcatctactgaaagagcagctcgaagagatggggcttatcaatgtgaccttaagtgagaagggcactttgatggcgacgttaccggctaacgtccctggcaatatcccggcgattggctttatttctcatgtggatacctcaccggattgcagcggcaaaaatgtgaatccgcaaattgttgaaaactatcgcggtggcgatattgcgctgggtatcggcgatgaagttttatcaccggttatgttcccggtgctgcatcagctactgggtcagacgctgattactaccgatggtaaaaccttgttaggtgccgatgacaaagcaggtattgcagaaatcatgaccgcgctggcggtattgcaacagaaaaacattccgcatggtgatattcgcgtcgcctttaccccggatgaagaagtgggcaaaggggcgaaacattttgatgttgacgccttcgatgcccgctgggcttacactgttgatggtggtggcgtaggcgaactggagtttgaaaacttcaacgccgcgtcggtcaatatcaaaattgtcggtaacaatgttcacccgggcacggcgaaaggagtgatggtaaatgcgctgtcgctggcggcacgtattcatgcggaagttccggcggatgaaagcccggaaatgacagaaggctatgaaggtttctatcacctggcgagcatgaaaggcaccgttgaacgggccgatatgcattacatcatccgtgatttcgaccgtaaacagtttgaagcgcgtaaacgtaaaatgatggagatcgccaaaaaagtgggcaaagggttacatcctgattgctacattgaattggtgattgaagacagttactacaatatgcgcgagaaagtggttgagcatccgcatattctcgatatcgcccagcaggcgatgcgtgactgcgatattgaaccggaactgaaaccgatccgcggcggtaccgacggcgcgcagttgtcgtttatgggattaccttgcccgaacctgttcactggcggttacaactatcatggtaagcatgagtttgtgactctggaaggtatggaaaaagcggtgcaggtgatcgtccgtattgccgagttaacggcgcaacggaagtcgtgattgcccgatgcgtatgtggactgccaattaccgggatgaaaccgttatattgacactggtccacatacttatcgtgcctacaggcgttcagtgcatgtaggcactataaggcgcaatcagcaccacatccggcttaaatccaaacttacccttcgaagaaccaatacccgctatttaccagcgccgcgagcattgcgaggaatgacggatcttccagcgcatcgccaaaattctccgcagtcagcgcaatgttgctggcgagtgcatccagtgccggacggtgcggggaatcgatcttctcaccattggcatacacgtcgtcgccaatgcgcaatacgcgcagaccacccaggcgcaccagcacatcaccttgtttcagcgcatcgtagatttcatctggctgataaggcggttccggcggcgcgatatccagttcatgacgtgactgggatataaactcgccaaaccattgcttaaagtgttccggctggttgatcaattcgagcatcatctcacgcagtttatccatctcttgcggcagaacatccgcaggatgagcgcgaggtggaacatccggatcgctgtagtagttgccgcccagttcacgttgcagcacataatcggcaaatccgctaatcagttcccgcgtattcggcgcgcgaaaacccacggaatagttcatcgcattttccagcgcgtagccttcatgcgggaatcctggcggaatataaagaatatcaccaggctccagctcttcatcgatgatggcttcgaacggatcgacctgtaacagatccggatgtgggcagtgctgtttcatttgcagcttttcgcccactcgccagcgacgacgtccggtaccctgaatgataaacacgtcgtactgatcgagatgcgggccgacgccgccgccaggtacagaaaaagagatcatcagatcatcaatacgccagtccggtagttcacggaacggtcgcatcagcgcggcggtcggctcatgccagtggtttactgcctgtaccagtaatgaccagttggtttcaccgagatgatcgtagctttcgaacgggccgtggctgacctgccatttgccatcctggtgactgaccagtcgactgtcaacttcgctttccatcgccagacccgccaactcgtctggagagatcgggtcaataaaattattaaagccgcgttttaacaccaccgggcgtttctgccagtgacgttcaagaaaatcgggccagttaagagtgagttggtattccatgttaagcatccacaggctggtatctgcaaccgattataacggatgcttaacgtaatgcgtgaagtatggacatatttattcatctttcggcgcagaatgctggcgaccaaaaatcacctccatccgcgcaccgcccagcatgctctctccggcgacgattttaccctcatattgctcggtgatttcgcgggctaccgccagccctacaccttgcccagggcgtaaagtatcaacccgttgaccacggtcgaaaatgacctctcgcttgcttaatggaataccggggccatcatcctcgaccacaatatagagatgctcgtcggtttgccttgcagaaatttcgacaaactcgaggcaatatttacaggcattatccagcacgttgcccatcacctcgacaaaatcgttctgctcaccgacaaagctgatctctggcgaaatatcgagagagatattgacccctttgcgttgatacactttgttcagcgctgaggtgagattgtccagcagtggggcgaccggatgcagctcgcggctgagcaatgtcccgccgcgcatactggcacgatgcaggtagtagccaatttgctgtgaaatgcggctgatttgctccagcattaccggctcagcatcactgacgctcatcttttcactacgcagagaacgcagcgtactttgcagcaccgccagtggcgttttcagactatgggtcaggtcggtgagcgtcgtacggtatttgtcgtaacgttcgcgttcactttttaacaatcggttcaggtttcgtaccagactggtcagttctcgcgttgtggctggattgagcaattcgcggttatgttcttccagttcgcggacttcttttgccagggcttcgatggggcgtaaactccaccaggcggcgacccacagcagcgggatcactaacagcagattggctgagagcacatagataaaccagctccagaccatataggaactttttagctccaccggaatggtatccaccaccacaatggttaattttggcatccgcgatgttgccgggtagacgtttactgccaccgagtgggtcatctccgcgtcgtcatcatcttcccgcacttcctgcaactgttgctgtatcgaatgatctccactcagcaagaggctggtatcgttaacatccgcttcaatttcatgaaaaccattcgatttcagccagtcaggctggatcatcttcatcagccagggcacgtcacgttgcgcccataaaagctgcccgttctcatcataaattagcgtcatggtggggctttgcttgtcgatattttcgggtaactcgacatgcaacttattgttttcccacttcgcaagggtatagaacagattgctctcgccacgtaacagccgaaacgtagttttatcgaaactgacgctataaccgatcagcgcgaccattccgtaggcaagcgaaagcaccagtactaccgcagccgttgccaacagaaaacgtacccgcagtgagagcgggaaaaaaagacgcagtaattttttcatcagcgcaattcgaacaaatagccctggccgcgaacggtagtaatcacttcttgcggatattgtgcctgaatttttttgcgcagacgtcccatcagtacatcaatggtatggctttcccgcagctccgcatccggatagagttggagcattaacgaatctttgctcaccactttgccattattgcgtatcaacgtttccataatggtgtattcgaacgcggtcagtttgatcacttcgtcattaatagataattcacggcgagagagatcaacctgaaacgggggtagcgaaatgacctgtgaagccaggccgctattacgccgcattaatgcctgcattcgcgccatcacctcttcaatatgaaacggtttagtcacgtaatcatcagcaccggcacttaatacttcgactttgtcctgccagctttcacgggcggttaataccagaatcggcagtgaaacatcattgctacgccagcggcgaatcagtgacagaccgtcctcgtcaggcaatccgagatcgacaatcgcaatatccggtaaatgttcattgagataataatcggcttctttggcatcttctgcgtcatcgacctgatgaccagcatcctgaatctgaactttaaggtggtgacgtaacaacgcattgtcttcaacaaccagtacgcgcatttttatttctccctgtcttaattattaaaatagtgtaacgcgattatgtgtttatgggggtaaacattaaataaaccagcggggaggggaggtaaagtgaaaaaagaaaaagtggataattttaataaacaggccggacagcatcgccatccggcactgatacgagtttatttcagctcatcaaccatggtgatagctcgaccaatatagttagccggcgtcatcgctttcaggcgggctttctcttcttctggcaacgccagaccatcgataaactgcttcatgccttcggcgtcaacgcgcttaccgcgagtcagctctttcagcttctcgtacggtttttcgatgccatagcgacgcataactgtctggattggctcagccagcacttcccagttgtgatccagctcatccagcagatggtcacggtttacttccagtttgctcacgcctttcagggtggattgatacgcaatcagcgcataaccgatacccacgccgaggttacgcagcacggtggagtcggtcaggtcacgctgccagcgggaaaccggcagtttgcttgccagatgctgcaataccgcgttggaaaggcccagattcccttcggagttttcgaagtcaatcgggttaactttatgcggcatggtggaagaaccaatctcaccagcaatggttttctgtttgaagtggttaagggcgatataaccccagacgtcacggtcaaagtcgatcagaatggtgttgaagcgcgcaacgcaatcaaacaattcggcaatgtagtcgtgcggttcgatctgggtggtgtacgggttccactgaatacccagcgaggtgacgaactcttcgctgaactgatgccagtcaacttccgggtaagcggcgatatgggcgttatagttaccgaccgcgccgttgattttgccgaggatctccacctgattaagctggcggtactggcgctccatacggtaggcgacgtttgccatctctttaccgatggttgacggcgtggctggctgaccgtgggtacgagacagcagcgggatatcgcggtactgaacggcgagatctttaatgccatcaatcagttgacgccagtacggcaggatcacttcatcacgcgcggttttcagcattaatgcgtgggagaggttattgatatcttccgaagtacaggcaaagtggatgaattcagaaaccgcgtgcagttccgggatctccgccactttttctttcaggaaatactcaaccgctttaacgtcgtggttagtggtacgctcgatggttttgatgcgtgcggcatcttcttcgctgaaattggcgacaattgcatcaaggtaaccgattgcgtcggcagcaaaagcaggaacttccttgatcgctgcgtgcgcggccagtttttgcagccaacgtacttcaacttgtacacggaatttcagcaaaccatattcgctgaaaatcccgcgcagcgcgctgactttatcgccgtagcgtccatcgacaggggaaacggcggtcagtgaggataattccatagatcacaactccggggttaaatgagcaagaatttgttttgcctgagtggtcaggcgattacgagaaaacatcagttgcagacgtccgccgccgacctggtgccagagcacggcggcgcgaatgcctgccagcagggttgcgcgaactttcgcctgcacttgtgggctttgcagtacagcaggggaaccggtgacctgaatgcgcgggccaagcgggctgatcacatcaacatagatagcagccatcgcgctcatcagcgtttcggactgtaaatcgaagtgttcgagctggcgttgcaggccgttgatccggttgcccagagtgtcgagcgcgcctttcgctgaggagagtttgcgctcaagcaccatcaagctgagtgtgtagcgggttaattcggcgtttaagccctggcgactgctggcattgagcacgccgagcagggtttccagcccgacgcgcaggttggcttcgctaccgccaaaaaccgccagcgtcgagctggggttcatatcaataatactgttgagtgagacgtgtagcgcatcggcatcacaatgcccctggtgagcgagttgttgcaccaggcgtgccgactgacaaataccggccagggcgagggtgatgtcatagtaattctttgccacgttcactgcttccttgttttaagtaaagataataatcagaccggcagcggcagacgctgctcaataataccgccaccgaggcacacttcaccgttatagaagacggcagactggcccggcgtcacggcggcaaccggttcatcgaaaatcacttcaatgcgatcatcgtccagcgccttgacggtgcaagggatatcggtctggcgatagcgggtttttaccgtgcaacgcatagtgccggtgaatggttcgcgatcgacccagtgcaactgctgggcaatcaacccgacagacatcagccgcgggtgttcatggccctgagcgacaaccagaatgttgttttcgacgtctttgtccaccacataccacggttcttcggtaccttctttggtgccaccgatacccagacctttacgctgaccgagagtgtgatacatcagcccctggtgctcaccaatttcatcgccatcgacggtaatgattttgcccggttgcgccgggagataacggcccaggaactcgcggaatttacgttcgccaatgaagcaaatgccggtagagtcttttttcttcgcggtgaccagaccaagatcttcagcaatcttacgcacctgcggtttttccagttcgccgaccgggaacaggctttgcgcaatctgctcatggctgagcgtataaaggaagtagctctggtctttattgctgtccagaccacgcagcaggcggctcttgccatcgacatcggcccgacgtacgtaatgaccggtagcgatataatcggcacctaaatcttcggcggcaaattcgaggaaggctttaaatttgatctctttgttgcacagaatatccggattcggcgtgcgaccggctttatattcggcaaggaacagttcgaagacgttgtcccagtactcggcagcaaagttaacggtgtgcagttcaatgccgagcttgtcgcagacagcctgggcatcagccagatccgctgccgctgtgcaatattcctcaccgtcgtcttcttcccagttcttcataaacaggccttcaacctgatatccctgttgttgcaacagccaggcagaaacggaggaatcgacaccgccggacatgccgacgattactttttttgcggtttcagacattggatcactcacgacattgaacttcaaggcggcgtattctatcacgcagccttttagatgacaccctttgtaaaaggccagttaaaatcgccaatcatctccagcggatagcgttgcccgctttgataacaacggatactttccgccaccagcggcgaacgaagatttgacgcctttaaaatctcttcggcgctgacccaacgacagcagtcgatatcgctgtcatgaggctgggtcgggcatatttgctcaagctcaatggcaaagaggaaacgcaaaaacggcgttttatctggcgcaatccactgatgcatacgaataaagtgttgcggctgcgcgctgatgccggtttcttcccacagttcacgggcggcggcttccactaaggtttcatcggcttccagatgcccggcaggttggttccataacgctttaccattaatcgtctcttcaacgactaaaaatttgccttctgcgtgcaccacacaagcaacggtaacgtgcggtttaaacattttgcatccttaatctgtcacttctcgccattcgccattggcaagattatccaaagagtaatctcccatcgcatagcgaatcagtcgcagcgtggggaaaccaacatgggcggtcatgcggcgcacctggcgattacgtccttcatataaggtgatcttcagccagctggtgggaatacttttgcgttcacgaattggtggattccgcggccataaccacgctggttcgccaaccagctccgcgccggcgggcagggtagggccatcatttaaggttacgccattgcgcaaggcttcaagtgcgtcttgtgtgggaataccttccacctgcacataatagattttcccggtgcgtttacccggctgggttaaacgcgcctgcaacgcgccgttattggtcagcaccagtaacccttcgctatcgcggtcaagacgacctgctgcataaacgccctgaaccgggatgaattcttttaatgttttgcgtccggcttcatcggtgaactgcggaagaacatcgtagggtttattgaacaggatcacacgcgtgggctggttttcaggtttacgcctggtagaacgttgcgagctgaatcgcttaacctggtgatttctaaaagaagttttttgcatggtattttcagagattatgaattgccgcattatagcctaataacgcgcatctttcatgacggcaaacaatagggtagtattgacaagccaattacaaatcattaacaaaaaattgctctaaagcatccgtatcgcaggacgcaaacgcatatgcaacgtggtggcagacgagcaaaccagtagcgctcgaaggagaggtgaatggaaagtaaagtagttgttccggcacaaggcaagaagatcaccctgcaaaacggcaaactcaacgttcctgaaaatccgattatcccttacattgaaggtgatggaatcggtgtagatgtaaccccagccatgctgaaagtggtcgacgctgcagtcgagaaagcctataaaggcgagcgtaaaatctcctggatggaaatttacaccggtgaaaaatccacacaggtttatggtcaggatgtctggctgcctgctgaaacccttgatctgattcgtgaatatcgcgttgccattaaaggtccgctgaccactcctgttggtggcggtattcgctctctgaacgttgccctgcgccaggaactggatctctacatctgcctgcgtccggtacgttactatcaaggcactccaagcccggttaaacaccctgaactgaccgatatggttatcttccgtgaaaactcggaagacatttatgcgggtatcgaatggaaagcagactctgccgacgccgagaaagtgattaaattcctgcgtgaagagatgggcgtgaagaaaattcgcttcccggaacattgcggtatcggtatcaagccgtgttctgaagaaggcagcaaacgtctggtccgtgccgcgattgaatacgcaattgccaacgaccgtgactctgtgaccctggtgcacaaaggcaacatcatgaagttcaccgaaggcgcgtttaaagactggggctaccagctggcgcgtgaagagtttggcggtgaactgatcgacggcggcccgtggctgaaagttaaaaacccgaacaccggcaaagagatcgtcattaaagacgtgattgctgatgcattcctgcaacagatcctgctgcgtccggctgaatatgatgttatcgcctgtatgaacctgaacggtgactacatttctgacgccctggcagcgcaggttggcggtatcggtatcgcccctggtgcaaacatcggtgacgaatgcgccctgtttgaagccacccacggtactgcgccgaaatacgccggtcaggacaaagtaaaccctggctctattattctctccgctgagatgatgttacgccatatgggctggactgaagccgcagacctgattgttaaaggtatggaaggcgcaatcaatgcgaagaccgtaacctatgacttcgagcgtctgatggaaggcgctaaactgctgaaatgttcagaatttggtgatgcgatcatcaagaacatgtaatcactacatgtgtttaatattgcaacgggcgtataacacgcccgttgttttatttatgtaggtattattaatagcatatcgagcatatttatataaaaccctttacttgagcccatatgggcatatttttataatgcaactattatgcaaacatttatttgttattttgctttctcctggaggacactcttgactgcttttgagtagactccataaatccttgttgaatggtgcgatgttataaatagtaataggatattctttatctttaaggataattccagatttaaccggtgtaaatatactgccaggagggagaaatatagtagattgataccagatgatcattttcatattaccccatatggctgaaaaagatatgccgcatgaaggttgaattatcgtgtcaattactatccacttcatttgttatgtcttatcctacggtatttaatatagttcatttggatgttcatttctttattttgcatatgagtatattaccccttcaaaaataaattaattaaaacgattgcttatataaaacaaaatttaaagcaaggaatctcaatggatgttaaacaaaatgagatttagtgaaaacaataaattattcacttcgttttagatttgtttagctataatgttatacattcaaatgactgaacatcctgtaattaaaacatagcctttatgctactttgtgccaatttgctaaacattatggttgcctttttatataacgataataatgaatataagcatgacatgagaataaggtttcaatttttgagttatataggaaaggtttaacctgttcctggctaaaatacatataactggatgatgactaaaccaaaacacatgtacgttaagtattgaaacgggcgtatggcacacccgttgtttttataaatatattaaccgttataaaataacgtatagaaagtcaagtgatcacatttcaaatatcaatttgatagtattggcatggtgattatttatgggtagcaataaaaggacagtatttatcatccatagggatagtctctgtacttttattcccattatgctaatgccttactgaattatgaagcatttcttaagcatccaactttagctagattaatggtttattattttctacatcttcaatatataaaagcgtattatcaatggcgtagtaactgcgtttgttatgattaacatcagtaacccaccggaaaacgcccgcgcctgctagtgttgaacagtattcccgaaatgtagattttccgcaaatatgaagcaatgcggcctcttttattttagcagggttcttggtcgtactaacttttaacaggttcctggttcctcttaataacaaaaccgtgtcatcgtgagtaataattctgatgttatccgtagccagataataaatgtaatgtgcaatacggtgatgttttaattctgaataaaaccaggagaagttttgctcttttctcacttgctcaaacatcttttgaaaaacaacgacctgatccatcaggataataacctcttgttagttgtgagactgcgtagtgtgcacgatcggttttaccacttcaatctggtctgtcctttggctgtgatatgtacagagtgtgatagagggaatatctgaattctcccggtgagcattttgcaacggaccagctccggtacaaacgctgttgtgggttcagattataacattctgtctaaggggcgggataaaggtgaaattagggggcatgaaagatgactttataaccttgctcaccccaatgttgtaaaagttcgttttgccttctcgttggtgccatgcctgtccagacaatcaatgtttgcgtcgggaacagttccgggcgcggcgattcaatgggatcagcaagaacagaaatgtgccatcctgacaatgataaacgccatgcttccagccacaatcgtgctctctcttcaacattccacgccatcagaatggcttctttaccgggcttacggcgcatttcgaaaagcgaggttgctgcgtattcaattaatgcgccgtcaaacatactgctcataatgcgggaggtgttgtgatcaagcacgagacgctggcgaacaggaaggtaaacatgattaatcaattgatctactgggtactctcgacccagtgaaataattctcgcgcgtagtttggcaggattagccatgcgaagaattgacatcatctcttcttgcaggcggctccagtcatcttccgtatcctggctggtggtttccagtaatgctttaactttgcctacagggacgccattacttatccaacgcttgatctcttcgatgcgttgtatgtcttcttcatcaaagagtcggtgtccgccttcactgcgctgtggttttaacaaaccgtagcggcgttgccaggcccggagagtgacaggattaatcccgcaacgttcagcaacatcaccaatgctgtaataagccacaattcctccttgcggtcacaaatctccgtcgcctgtacacgacccaataatactttgtacaatatacgctaaaattgtacaaagtataaataagatttcagctaaattggatgaaacattatttttaatgtggattaaatttaaacgtaacgtattcattttcacgatgatttactgaaatcatgtgaaagaatgtgctgaaaattattttttctctggccacgctatggaagggataccattcaatttagctttagcaaacagatctccctgaaacatctcaattcctgcggattcaagccacatccactcttctggtgttgccacgcccatagcactgacttgaatttcaagtgatgtacagcattttatgatcgcttgaataattgcctgccgtggcccgcttttatgaacattggtaatcaattcctgactgattttaattctgtcaggctggaagcgtgacaggagtaacaaaccggcaaaacctgcgccaaaatgatcaattgctacactgataccggcagccttaagcgatttaatcgcttctgcaaactcatcaaaccgagatataacttcactttcagtaaattcaacgatgatttgttcaggcaccagagcattggcctttatttcatcaagtaaaaaagagactgcgtcaggttcgttaaccagggtcataggtaatagattgattgaaatcattttatcaccgagctcaagtgcgtgtgccatcgcgaatgcaagcgccttacttttgagatccgctgtgtagatttccccgtctttacgctgcccaaccgctatggctgatgggctatcttcatttttttgcacaatggcttcaaaagcgattatccgccgcgataagggatcgacaataggatgaaaggcaaagtggtcgtttatagttggtgaaagggtacaggaatcaagttctttatcagatccgtcagcgataaaaagccaggagtcttcggcagggatctcgaaataggttgattgttcggttgcaaggacaaaagtacgaaaaaattgtagcgctctgtcatcataagttagctgaaattttgatgtgcctttgtcgaatacggcctgtaaaacgtcatctcgctcgtgcaggcgcaaatcaaataattccattcccgctttgccaaaacggcgagcaggcgcgtaatcgcacagcagctcaacaatattatagtgccgtggatcctggcatatagcccgatatatcattttaacctgttcttccggaccttccagaagctggaaaaaatgagaaccattaaacagtaagatccctgttacgtcagactgcatgttcctgcgatttgctatcgaaaccatttcttcgatttttttgacaggttcgtcgtcacgtatatggctacgataaataagggtggtaagcattaacaatccagggtaatgggtgaggcgagagtaagacggtaacagacatatcttcttgtgtctttcttttaataccaaaacataaccgtttctttacattgataaaaaatggaaaaagttgaacactagttggcgaaaaatcttgtatagattgtcagttaaatgatgcaatatgttttatcataacacattgttttatatgcattagcactaattgcaaaaaattaatttatcattctgtacatatatttcgtacaagtttgctattgttacctcacttaacattgattaacatttttaacagaggcgtagcatgcatcaaaattcagtgactttagattctgcgggagcaatcactcgttactttgcaaaagctaacttgcctactcagcaggaaactctcggggaaattgtgactgagattttgaaagatggacgtaatctgagtcgaaagtcgctttgtgccaaacttctttgccgactggaacacgcgactggggaagaggaacagaaacattataatgcactaattgggttgctttttgaataatgcaacagcctgattatttaacaggttagctatgaagtcgttatgaagacatctgataatgaacgtataaaatatgaaattactggccaggcggtgatccagatactgcgcatgaagataaatttttcattgcagactcttattaagcaattactcgtaatgaaatcggctgaggaagatgctttccgacgcgatttaattgacagcataattcgtgattttagcaatagtgattcaggagggccaaaccgaagaacagcgacagctgacaataaaagtatgttcaatggtaagaaaataaacagaatacattaaaatttcataagtaagatgagaggttaccatgcttgaagatactacaattcataatgcaataactgataaagcgttagcaagttactttcgcagttcgggtaatttgttagaagaagagtcagctgtgttagggcaggctgtcaccaatttaatgctttcaggcgataatgttaataataaaaatattatcttaagtctgatacactccctggaaacaacaagtgatattctcaaagctgatgtgattagaaaaacactggaaatcgtgttgcgatacacagctgatgatatgtaacttctaattattaagtataagtttatagaaaactcattcatcttatttttgtctgtcgctttagactatacacagcataattttattgggttaatatttctacgaggctgacatgaataattcaatcccagagagatttatttttcaatgtgctttgtttaaaaatctcgagagggaggtgttcatgacgcatgggtatgttgatagtcatattattgatcaggctttacgcttgcgtttaaaagatgaaaccagtgtgattctttctgatctctatctgcaaatattgcagtacattgaaatgcataagactacactaacggatatcattattaatgacagggaatccgtgctctcttagaacttgagtaaggttttagaataaacatcagctgtatcaccatgctgatgcaaagtgagcatttcaggcgttatgctttcttattatgtccgcaatatcaggtgtcaagaatggagagttctcgctctccattcttgacgcctgatatcccgcctaacttattttgtactgcctacattatgctcaataattaatgggttagatcaagatggagaaaattttatcttcggcgtggatatttcttatgctctctaccatgctctctgtagatgccagcgcgagcgaatgaatggcattttcatgtattaaaccctttggccgggacaagcaaatgcgcaatacactcatacccatcctcgttgcgatatgcttgtttattaccggtgtcgctattttgaacatccagctctggtattccgcaaaagcagagtacctggcgggagcgagatatgccgccaacaatatcaatcatatacttgaagaagcgtcacaagcgactcaaacagcggttaacattgccgggaaggaatgcaacctcgaggagcaatatcagcttggcactgaagcagctctgaaacctcacctgcgcacaatcatcattctcaaacagggaatagtctggtgtacatccctgcctgggaatcgggtcctgttgtctcgtattcctgttttcccggacagtaatttactgttggctccagcaatcgacaccgttaatagattacctatcctgctctatcagaaccaatttgcagatacgcgcattttggttacgataagcgatcagcatattcgtggggcacttaatgtacccttgaaaggggtaaggtatgtattacgcgtggcggatgacattattggaccaacgggtgatgtgatgacgcttaatggacattatccctataccgagaaggttcactccacaaaatatcatttcactattatctttaacccgccgccactctttagcttctacagacttatcgataaaggctttgggattttaatatttattctgttaatcgcctgcgccgctgccttcctgcttgatagatatttcaataaaagcgcaacgcctgaagagatcctgcgacgggcaataaataatggggagatcgtccctttttaccaacctgtggtaaatggtcgggaagggacattgcggggagttgaggtgttagcccgctggaaacaacctcacggtggatatatatcacccgcggcatttattccacttgctgaaaaatccggattaatcgttccgcttacgcaaagcctgatgaatcaggttgccagacagatgaacgctatcgcgagtaaattgccggaaggttttcatattggaattaattttagcgcttcgcatattatttcgccgacgtttgtcgacgagtgtttaaatttccgtgacagttttacccgccgcgatttaaaccttgttctggaagtcaccgagcgtgagccattgaatgttgatgaaagtctggttcagcggttgaacattctgcatgaaaatggttttgtcatcgcgctggatgatttcggtactggctactcagggctttcttatcttcatgacctgcatattgattatatcaaaattgatcacagtttcgttggccgcgtaaacgcagacccagaatcaacccgaattctggattgtgtattggatctggcgcgtaaactttcgatcagtatcgtcgctgaaggtgtcgaaacgaaagaacaacttgactatctgaaccaaaataatatcacatttcagcagggttattatttctataaacctgttacatacatcgacctggtcaaaattatcctttctaaaccgaaggtgaaggttgtggttgagtgaaaattgatcagtaaggccatagtgcggtgtaattatagacagctaattagctcgttgcctcttgttactattgttcattattttgtttgctataattgtttgaaagttttgacaggattgccattagtagcatgaacaatagtaataatctggattatttcactctctatatcatcttttccattgcatttatgctgatcaccctcctggtcatccttattgcaaaacccagtaccgggctgggagaagtgcttgtgacgataaatttgcttaatgcccttgtttggctggcgatcaatctggttaatcgattaagagaaagactcgtcaaccacagggatcagcaataatctttcagtttctcactgtcagtatgcggctgaatgggttgctggcagtgaacgcctggatcattgaaggaaaggcattattgcgcaaatagttgtcaaccctggtgttatcacggttgtttttatatatcaccgaaataatcctcatcgcaactattaacaattttgatgtcgaagagttatttgttaaacaaaatcgtcaccctaaagtgatcaatgtcatgaaaataaggtgaaaaatgataatgccgacttatttatcatttatatattgtcgctgtttatctatttaaattttttgtgcttttgtttttgtctttaccctccgttttggtaatctgaacgcataggttatttgaccaggaatgtttgttaatccaatgaatggatggttaatctatgaaactgaaaaaactctccgggtttagtttgggacttattgctctggcggtgggtaatgcatatgctgaacagtttattcagcacgatgaatataaacatgctgtggcaataaaagatggaaaagtaaaagatattgataatgcgctagttataacaacgggtaatggaagttacgggtatccgttgcaggagagggtagcaagttaaccattaacaatggcgtcattgtaacaacgggcggtttatatccttctgacaatagtcctctaagcacagcattaacagctagcgcaatcgtaagtgaatttggcggtgctgttattttgcagggtaaaaacacgattgtcacaacgggggattactcaattggtttgctaagtcaaacgagtggaaacctgaatactgacaccataataagagtcaactctga

SEQ ID NO: 521 - DNA, 94801 bp, Escherichia coli
acttactgatttagtgtatgatggtgtttttgaggtgctccagtggcttctgtttctatcagctgtccctcctgttcagctactgacggggtggtgcgtaacggcaaaagcaccgccggacatcagcgctatctctgctctcactgccgtaaaacatggcaactgcagttcacttacaccgcttctcaacccggtacgcaccagaaaatcattgatatggccatgaatggcgttggatgccgggcaactgcccgcattatgggcgttggcctcaacacgattttacgtcacttaaaaaactcaggccgcagtcggtaacctcgcgcatacagccgggcagtgacgtcatcgtctgcgcggaaatggacgaacagtggggctatgtcggggctaaatcgcgccagcgctggctgttttacgcgtatgacaggctccggaagacggttgttgcgcacgtattcggtgaacgcacgatggcgacgctggggcgtcttatgagcctgctgtcaccctttgacgtggtgatatggatgacggatggctggccgctgtatgaatcccgcctgaagggaaagctgcacgtaatcagcaagcgatatacgcagcgaattgagcggcataacctgaatctgaggcagcacctggcacggctgggacggaagtcgctgtcgttctcaaaatcggtggagctgcatgacaaagtcatcgggcattatctgaacataaaacactatcaataagttggagtcattgtcacaacgggggattactcaattggtttgctaagtcaaacgagtggaaacctgaatactgacaccataataagagtcaactctgacggttcggttaccccctctttttctgacggagatgatacatttattgttactgcgggtaatcacgcagtcggcgttcttgcgtgtgcatctcccggaagcgcgcgtgcgtgtgtatcttctcttgatgaagaaagtactaccgatacaggaagtaatgaaaataatgccatagcaaaactggatatggcaaaaggggagatcacaacccacggaacagaaagttatgccgcgtacgctaatggcactgtcgtcaaggctggtgacacgcttgattataccaatgccagcgttacattaaccgatgttgatatcaccacgcatggggacaatgctcatgccatcgctgcccgccaggggacagtttcatttaaccagggagaaatttatacaacgggtcctgacgccgcgattgctaaaatttataatggcggcacggtgacgctgaaaaatacatctgcagtcgcgcatcaggggtctggaattgtgctggagtcttccataaatggtcaggaagcaacggtagatattttatctggtagctcactacggtcagcaaatgaaatcctctaccataaaaatgagacgagtaacgtgaccattacggatagtgaggtatcatcggctgcagatgtttttatcaataatattaaaggtcatttgaccgtcgatgcaactaattcaaaaataacgggttcagctaatatttcaacagatgataacactcatacctatctgtcgctttcagataatagtacctgggatattaaagctgactcaacggtgagcaacctcacggttgataatagtacggtctatatttcccgggcagatggacgggatgtcgaaccaacaagattaacaataactgaaaattacgttggtaataatggcgtattgcatctcagaactgaattgggtgatgataattcagctacggataaagtcgttattaatggaaatacctctggaacaacccgagttaaagttaccaatgcaggaggcagcggagcttacacgttaaatgggatagagattatcagcgttgagggggaatcaaatggggaatttattaaggattcgaggattttcgccggtgcctacgaatattcattaacccgaggtaataccgaagcgaccaataaaaactggtatctgactaacttcctggcaacgagcggcggtgaaacaaactccggaggaagttcagcgcctactgttgcgcctacccccgtcctgcgcctcgaagctggaagttacgtcgccaacctggcagccgctaacactctttttgttatgcgtctgaacgaccgtgcgggtgaaatgcgctacatcgatcctgtaactgaacaggagcgttcaagccgactttggctacgtcaaattggcgggcataatgcctggcgtgacagcaacggacagttgagaacgacctcgcatcgctacgtctcgcagttaggggccgagctgttaaccggtggttttaccgacagtgacagttggcgtttgggagtgatggctggttatgcccgcgactacaactcaactcattccagcgtgtcggattatcgttcgaaagggagtgtcagaggctattgcgcagggctgtatgccatttggtttgccgatgacatcagtaaaaaggcgcatacattgacgcctgggcgcaatatagctggtttaaaaactcggtgaaaggggatgaattagcctatgaatcctatagtgcgaaaggcgcaaccgtctcgctggaagcgggttacggctttgccctgaataaatcctttggtctggaagcggcgaaatacacgtggatattccagccacaggcacaggctatctggatgggcgtcgatcataatgcgcacaccgaagccaatggctcacgtattgagaatgacgcaaataacaacatccagacccgacttggtttccgcacctttattcgtactcaggagaaaaacagcggtccgcacggtgacgactttgaaccttttgttgaaatgaactggatccataacagtaaagattttgctgtctcaatgaacggtgtgaaagtcgaacaagatggggcgagtaatttgggggaaattaaacttggcgtaaatggcaacctgaatccagcggccagcgtctgggggaatgtgggcgtgcagctgggtgataatggctacaatgacaccgcagtgattggtgggcctgaaatataagttctgatcccgccgttagctaaaaaaccgcgtcgtattcatcgacgcggtacatatgaaatattattttttgccgatagcacgcatggtgtcatcaattgccgtgatcaacagcatttgcgggtctttagcgcaaacctgattcagtttttctaccactttggcgctcagttccggagattgctcaatttttaaatcacggctggcaacgctggcattacccattaccgcaacaatttctgcaacctgtgcgctgtcagtttttgccatttcgttggcttctgcgcaagtaatataggtttctgacggcaaaccgtttttaatattgtagtcctgcgcccaggtcattggtgcgaaaacaaacaggcccgccagtaaagcaaattttttcatcatcattccttatttcattttacccagaattgcaccacccgtaccgccaatcacggcacctttaatcgccccttcgaggccattgccggtcagaacgccagtgacagcaccaacggcggcacctacttttgcacctttacgcgcatttttaccgtcgcggcctttttctgttactgcaccaacaccagcgccaacagctgcacctttcagtacgccattaacaccattgccagtaagtaaaccaacgcctgcgcctagcaatgcacctttcgtggtgcgattcatatccgccatcgctggcgtggagcagaacaatgctgagataagcccgaaggcaagtatttttttcttcaacttagatgtccggtattaagtaagttgcacacacaataatttcgtcttcaattaagatctgcttaactaaagaacgctcgctattattcagataattcaaaatgagcgtggctgtgatgataggaattatgttttttacgtgaatgagaataatcttaaatgaggaataactcattgattgacaatatttttattcaagaagtgtcattgactgttaacgcaatgttgtaaaggtaagataatctgatttatcaatattattgtgtgatttttatgtgagcagaagatattcatcagcaacgattacattagtcattttattttgccgacggcctcattgtcgaaagataagcgtacgacagtattatctgaaaagagtgattttttatccaactacacttcagcgcactgcgtgtaaaaaatgcctctttcttatgcgggatatcatcatttcatcatgatgtctttggtgagcggtgaacacaatacacctgcgctgtctcttcaggatgaatcccctggtctggtgcctgcgggctgatgttgcagcagagcttaggtcacttagacgctactatcatttatccaatggcatggaatcgaaatcagtcgatacccgcagtatatatcgtgaactgggtgcaacgctgagttacaacatgcgtctggggaacggtatggaaattgaaccctgcctgaaggcggctgtgcgcaaagaatttgtcgatgataatcgggtgaaagtgaatagtgacggtaattttgtcaatgatttgtcgggcagacgtggaatataccaggcaggtattaaagcctcattcagcagtacgttaagcgggcatttcggggtggggtatagccatggtgccggtgtggagtccccgtggaacgcggtggctggtgtgaactggtcgttctgaccatcaacgattaaactgcgcttcggcgcagttttcgtttacaggatgttgaaagagaaaattctggggcaaaaaaagccgccagttacggcgggaaacctcatcctatgggagaacaatgaataatgaaattgcggggttatcatctcccagtatatccacactaacaacagggttatttactcaaccaggcataaacattttgttctgtgcgtgggaacagccttaaggtgtaaagggggaggtggaaatagcaatgaggagtatcagcaagaatactcgccgctttaccacaacgtggatgagagggatgaaaaactcaaggcagaaatgactctgccttgaagataaatgcgtttttacagcgggcttatttcagctcttctgcttccggtaaggtcacgttcagctcaagaatagaaatatcgccatctttttgctcaagctgtacggttaccatctcaggatcaatttgtacgtatttacaaatgacctcaagaatatctttacgcaactgcggcagataatgcggttctgcatcgctgcgacggcgttcagcaacaataatctgcagccgttcttttgcaatgttggctgtgtttttcttccgcgagagaaagaaatcgagtaatgccataacttatcctccgaacaagcgtttgaggaagcctttcttctcttcttcaatgaagcggaaaggacgttcttctcccaacagacgttctacggtatctgcgtaggctttacccgcatcggcgttaatgtcgagaatgaccggttcaccctggttagaggcgcgcaatactgattgatcctctgggatcacgccgacgagtttgatgcgcaggatctccagcacatcttccatgctcagcatgtcacctctgcttacgcggcctgggttatagcgcgttaacagcaggtgctctttaataggctcttcgccattttctgcgcggcgtgatttcgacgccagaatgcctaaaatacggtcagagtcgcgtactgaggagacttccgggttggtggtaataatggcttcgtctgcaaaatagagtgccattaacgcaccggtttcaatccctgccggggagtcacaaacgataaattcaaaatccatcgctttcagatcatcaagaactttggcgaccccttcacgggtgagggcatctttatcgcgtgtttgcgatgccggaagaatatagagattttcagtacgcttatctttaattaacgcctgatttagcgttgcatcgccctgaatgacgttgacgaaatcgtaaacgacccggcgttcacaacccataatcaggtcgagattacgcaggccgatatcaaaatctatcacgacagttttctttcccttctgggccaaaccagtggcgatggccgcgctggaggttgtcttaccaacaccccctttgcccgaagtaacaacaataatgcgtgccatagaaattccttgttaaaaagggatcaatttaacggttgaacggtcaaagcgttttcgactaactgcagtcgcgccgctttgccataaaattctgctgggatttgatcactcagccagtattcacctgcgatggacaccagttccgccatcaggttcgtacaaaatatttgcgtttcccggtcaccacttgcccctgcaagcgcacgaccgcgcatcatgccatagacatgaatgttcccatcggcaatcaattcggccccagcgctaacgtggcttgtaacaatcagatcacattgtggagcataaatacgctgaccggaacgcaccggggtatctattaaacgcgtttttgtgaccggcgttgtattttgcgctggagcctgtggtgcgggagctggacgcggcgctttttcctttccttccgtcaggataggcagccccatcttttcaatttcggctttaagttgcgcatctttgcagccacttacgccaataacccgcaaaccggttgccgaaaccgccttatgcatcgctgaccagtttaccgggtcttccagtgcactgacgttgagtacaacgggggcatgttttaaaaatgcgggggcctgagcgattttgtcttccagcgcctgatggataaccttaggttctgcctcatgcagatgaaccacagataaagtgaagctactgcctttaagctcgattggcgtgtttgacatcctggccttactcaattagctattaatcatcgccagcgcgcgatgatgttccgaagactataaggcatgttatagtctggattatattgaggcaagtcaccctcccatttattcagagtaaaagtctattctgtgataaatggcgctgattcatagcttaaaaaatacccttgtcaatcaacccattgccgtcgtacttttgattgttcttatttacgcttcctttttccgcaccctaatcgtgacagcatctccagacctgtttaaatatccagtattgaggcaagtgtattttttcaccacgccaggctttcttaactttccattttttgcggcatcattaaagaacagatacccgttatcttaatatccgccacagaattgctctatcatagaaaccgcagaagacgtctgatacttctgtcaggtcatcgtaactcgtccaggtcagcggttttgattacggattgatgatgaaatgagcataagtgttgtacggttggattatcaggatgtgctatgaatatgatgcgtattttttatatcggattgtcaggtgtggggatgatgttctcatcaatggcgtctggacatgacgctggcggacttcaatctccggcgtgcggcgttgtttgcgacccgtatatttgtgtgaactcagatggcatttccccagagttaacaaggaaatatctcggcgaaaaagccgctgaaaacttacaatcattacaaggctacgatcccagcgaatttacattcgctaacggtgtattttgcgatgttaaagaaaaattatgtcgtgatgatcgttattttggtgtggatggtaagcggagtggaaaaatcaatcaaatcaccacaaagatgttatttatgtgtcgtgagtgatgccttgtttacattatgttctattcggcattgtctgctattcgtcattaacctcttgagcgacagagaggagtggggcgttaacgtttatgacggggagagtccccgtcggttgacatttacttaatttgaatatcgacgttatatttttttagttttgtttttacgggcgtcgtttcgggtttgcagcactcgcagctcatatttgccagaagcagggagtgagtattgtccgtgactatcgagttctggtgaatatctggataaatcaactgaatcatcgattcctggcccgaagaggtaagtatcagcgccttcattagagatactcacatgcactttctgaccttttttggcatagaaggtatatgtatcgtaatcgtatccctttatttcgccggagtactgagcgctgctatggcctttgctgaactcaacattgacattcttacccgcagcaaagctcgtggaggttagcagtgcaagcagcaatacagccttactgatgctcttgattttcattggtagtctcctgttcagaatgagtacgatgaactgttataatataacaatcccttacgggagaattccagtggcttttctgcgttcggtaaaatcccggcgcggcattttttgccggggggattacttataaaggggcatggactcaacaaaccgtagaaatctacagctggctggcttgtggcgcgggtttcattgatgttagcttatgccaaaacctggcatcttaaagagtaaaagtatgttttgtgtgatttatcgaagcagcaagcgtgaccagacctatttatatgtcgaaaaaaaagacgatttttcgcgtgttcctgaggaactgatgaaaggttttggtcagcctcagttagcgatgattctgccgttggatgggcggaagaaactggtcaatgctgatattgaaaaggttaaactggcattaaccgagcaaggttactatttgcagttaccgccaccacccgaagatttgctgaagcaacatctttccgtcatggggcagaaaacagacgacactaacaaataaccgatatccggcggtggcattatctttgtcggcgcgggttttcatatccacgataaggtgaggggaacgttatgtatcaacatcacaactggcaaggtgcgctgctggattatccggtgagtaaagtagtctgtgttggcagtaactatgccaaacatattaaagagatgggcagcgcagtgcccgaagagccagtgctgtttattaaaccagaaacggcactgtgcgatctgcggcagccattggcgatcccatccgatttcggttcagttcatcatgaagtcgaactggcggtgttgattggcgcgacgctgcgtcaggctacggaagagcatgtccgcaaagccattgccggttatggcgtggcgctcgatctgacattgcgtgatgttcagggaaaaatgaagaaagccgggcagccgtgggaaaaggctaaagcgtttgataactcttgtccgctttccgggtttattcccgcggcggaatttaccggcgacccgcaaaatacaacgctgggcctgagcgtaaacggcgagcaacgtcagcaaggtacgactgcggacatgatccataaaattgttccgctgatcgcttatatgagcaagttttttaccctcaaggccggtgacgttgtgctgacaggcacgcctgatggcgtcggcccgttgcaaagcggtgatgagctgacagtcactttcgatgggcattctttggcaactcgcgttttgtaatactttttgccgcctgaaagcggcggcaaaacttgcatcgctgtgccagactggttataaggtgcgttttaacgtaatggcggaacacctgatgagcgatgtacctttctggcaaagtaaaaccctggacgaaatgagcgatgcggaatgggagtcgttgtgtgatggttgcggtcagtgttgcctgcataaactgatggatgaagacaccgacgaaatctacttcactaacgtcgcctgtcgccagctcaatattaaaacctgtcaatgtcggaactacgaacgtcgtttcgagtttgaacccgactgcattaaattaacccgtgaaaatctgccaacattcgaatggctgccaatgacctgcgcttatcgtttgctggcggaaggtaaagatttacctgcgtggcatccgctacttactggttcgaaagcggcaatgcatggtgaacgtatctctgtgcgtcatatcgcagtgaaagaatcagaagtgattgactggcaggatcatatcttaaataaacctgactgggcgcagtgataaatttaatagatgttgatgggggctttcttaatatacgtctggatgctcgccatttcgtagccctgtttttgaaagcgctctgtcataatgagagttacccgataccttattatcaacaggtaactctcaatctttaaaaaacgtctgtgtttttaaatgtgataaaccttataccttgagtacatggagagaataatcgcttatcagacttcaggtacctcaaagagtgtctttttaccgtgtcttttctgatactcattacaggtgttaatcattttttttgccgcttcttttagcaaagaaagcattaaatcatcataatcaacatagaatctggttgtttcagtttccgtttttatctccccgatggcggctatttcggtggttaatttcaatttggcggcatcgatatctttattcgcttgtttaaccgtgttagacagggtggtaaagaaattctgcacagattttaacttgttcttcaattctggaatcagtttcccttcaactacgcccgcagcaatagaataggaaatgattaatccaaatggaccggcgacgacaccggctgcggcaccggcatacgcttccttcctgattttatctacctgtgactggaaaagctgcttttttctgaaaaatcattggttaactggctatctaacgccagcagtttcccggaagcgttgttgaaactttgtgagcttaccagcagggatttttgcgcttcattcagcttcgtgatgccgtcatccagtaccttaatgagaatgtctttctgggcggatgctttcttctcattgtactcatcaaatagaaaaatatacgctgcgagcaattgcgtcgcaacaccacaccattcatacactgtttgggttgcttcaaaatacttatcctggctatccataagtaaggttttaatatcgccgactaaaacggaggctgcctgtgaatactcctgtttaaagcgacttaactcttttatggtttcatcaaaggtctgctaggggatgacctgatcgagatatttattataaagatctaatgctccatctgcagtttcgattgcgtttttaactacttctaccgttttatctgcaacgatttcagtcataatcattcgcctctttaaatatataaattgtaatgaaactcctgttttacaactattaataaattttacttcatctaattcatagttagccgggcgggatgcgtcaatgtctttatttctattaatatgataaatatcaaacaatgtttaatgtcattatggcgaatgcttctattctatttttttgccgggtgatatttttcatttctgctggatgagcgtcgtcgccagaaggccacgtgagcacaggataagagaacgaaaaatcagcagtctatgcagcgacaaatattgatagcctgaatcagtattgatctgctggcaagaacagactactgtatataaaaacagtataacttcaggcagattattatgttgtttatcaagcctgcggatctccgcgaaattgtgacttttccgctatttagcgatcttgttcagtgtggctttccttcaccggcagcagattacgttgaacagcgcatcgatctgaatcaactgttgatccagcatcccagcgcgacttacttcgtcaaagcaagtggtgattctatgattgatggtggaattagtgacggtgatttactgattgtcgatagcgctattaccgccagccatggtgatattgtcatcgctgctgttgacggcgagtttacggtgaaaaaattgcaactacgcccgacggtacagcttattcccatgaacagtgcgtactcgcccattaccatcagtagcgaagatacgctggatgtctttggtgtggtgatccacgtcgttaaggcgatgcgctgatgtttgctctctgtgatgtaaacgcgttttatgccagctgtgagacggtgtttcgccctgatttatggggtaaaccggtggttgtgctatcgaataatgacggttgcgttatcgcccgaaacgctgaggcaaaggcgctgggtgttaaaatgggcgatccctggttcaaacaaaaagatctgtttcgtcgctgtggcgtggtttgctttagcagcaattatgagctttacgcagacatgagcaatcgggtgatgtcgacgctggaagaactatcgccccgcgtcgagatttacagtattgatgaggcattctgcgatctgacaggtgtgcgtaattgtcgcgatctgactgattttggcagagaaattcgcgcaacggtgctacaacgtacccatcttactgttggtgtggggatcgcccagaccaaaacgttggctaagcttgccaatcatgcggcaaaaaaatggcagcggcagacgggtggggtggtggatttatcaaatctggaacgccagcgtaaattaatgtctgctctccccgtggatgacgtctgggggattggacggcggatcagcaaaaaactggacgcgatggggatcaaaaccgttctcgatttggcggatacagatatccggtttatccgtaaacattttaatgtcgtgctcgaaagaacggtgcgtgaactgcgcggcgaaccctgtttgcaactggaagagtttgcaccgacgaagcaggaaattatctgttcccgctcgtttggtgaacgcatcacggattatccatcgatgcggcaggccatttgtagttacgctgcccgggcggcggaaaaacttcgcagcgagcatcaatattgtcggtttatctccacatttattaagacgtcaccatttgcgctcaatgaaccttattacggcaatagcgcgtcggtaaaactgctgacgcccactcaggacagcagggatatcattaacgctgctacgcgatctctggatgccatctggcaagcgggccatcgctaccaaaaagcgggcgtgatgctgggggatttcttcagtcagggagtcgcgcagctcaatttattcgatgacaacgcaccgcgccccgggagtgagcaattgatgacggtaatggatacactgaatgctaaagagggcagaggaacactctattttgccgggcaggggatccagcaacaatggcagatgaagcgtgccatgctttcaccacgttatacaacgcgaagttctgatttactgcgggtcaaataaatatagcggcaggaaaaaagcgctcccgcaggagcgctgaagggattagcgaccgaacaggtcacgttttttcgctttaaacggctgggaaatcaccaccagcaccgcgacaatcaggtaagcgataaaaataccgagcagccactgcggcatttccagacctaaaaaatcccactgacgctcggcgcaatcgccagaggcgacaaacacttgcggcacccatttatccagcggcagccattccgggaaacgaaccataaaatcacaggtggcaaacggcgaaggatagagctgaagcatggtgtgctcgtaagttaactgcacaccgcggaacgcactatacaaccagataaccatcgctacataacgcagcggagttttcggggcgatcgcgccaatcagcgcagcacccagaacgccgaataacgcgcagcgttcataaatacagagcacgcaaggtttcagtaacatcacatgctggaaccacagcgccgtcagttccagtgccagagcagtaaacgccatcaacagccacgcgccccggccttgtgaacattggttcaaaaatcgcaacataatcatttccctgcaatatgcatagagtgcgcagtttaaaccaattcattcgctgcgccaccaggaggcagcaaaaataggacgcaattggacaattatcgggcgaaaaggcaaaccgggcatttatatgcccggtaagttgttatcaaagcgttgctatccagcccatttgcataaaccattcggttacaggggcaagcgtaaactcgacgcagagcaagccgacgagtgtcaggacgagggtgtaaggcagggccatccacaccatgcggccataagagaggcgaatcaatggcgcgagtgcagaggtcagcaggaacaggaacgcagcctgaccgttcggcgtagcgacagagggcagattggtaccggtattaatggcgaccgcctgcagctcgtattgcttcaacgtgatagcgccactttccattgccgctttcgcttcgttgatataaatcgtccccacgaagacgttatccgaaatggatgacagcagaccgttgaaaatatagaacagcgacagctgagcatgttcagatgcctgcaacacaaactgaataatcggcgaaaacagttgttggtcgataatcaccgcgactaccgagaaaaacaccgtcaacagtgcggtgaatggcagagattcggtgaaggctttaccgatagcatgttcatcggtgacaccggtcaatgatgtcgccagaataatgactgacaaaccaatcaagccaacttccgccagatgcaacgccagcgcagtcaccagccagacgccaataatcgcctggacaatcagacggattttatcctgacgggtacgctggtggcggctttgatcgtcaaactgttgcaacacttcgcggactttctccggcagcgtttcaccgtagccaaaccaacgcagcttctctaccagcaggcaggttaacaggccacaaatcagaaccggaacggtcaccggcgacatgcgcaggaagaaatcgccaaaatgccagccagccgctttagcgatgatcaggttctgtggttcgcccaccatggtcatcacgccgcctaatgcagtgccgacaccggcatgcatcatcaggctacgcagaaagccacggaactgttccagaaccactttgtaatgcttgtcgatatgactatcgtcttgcaggtcggtatcttcggtacgggaagaggctacgcggtgataaataccataaaaaccgacagcaacgctgatcaccaccgccacgacggttaaggcatcgaggaacgcggagaggaacgctgccgccacgcaaaaagagagcgacagcagcattttggagcgaatgcttaacagcaaacgggtaaatatgaacagcaacagctgtttcataaaatagatacccgccaccataaacatcaataacagcaagacttcaagatttgccgccacctcttcacggacgtgttccgcgctggtcatgccgatgaataccgcttcgatagccaacagaccaccggggagcagcgggtagcatttcagggccatcgccagagtgaaaataaattccgctaccagcaaccagcccgcgacgaaagggctgatgaggaaaattaacgggtttacgattaagaaaatgatgagggcgagtttgtaccagtcgggggactggcccaaaaaattgcgccatagcgcgcggccccaggagatctccatgatggtttcccttaccttacaaataatcaatgatgtttttatgtttaaacgcaaagcttaacggtcaggcaggagtgaggcaagtcttgatagtcaaggggaaagagatgcggaaaatgaagccttgatcccttttttcttctttttgtctgctatcagcgtagttagccctctggtatgatgagtccaactttgttttgctgtgttatggaaatctcactatggtcattaaggcgcaaagcccggcgggtttcgcggaagagtacattattgaaagtatctggaataaccgcttccctcccgggactattttgcccgcagaacgtgaactttcagaattaattggcgtaacgcgtactacgttacgtgaagtgttacagcgtctggcacgagatggctggttgaccattcaacatggcaagccgacgaaggtgaataatttctgggaaacctctggtttaaatatccttgaaacactggcgcgactggatcacgaaagtgtgccgcagcttattgataatttgctgtcggtgcgtaccaatatttcaactatttttattcgcaccgcgtttcgtcagcatcccgataaagcgcaggaagtgctggctaccgctaatgaagtggccgatcacgccgacgcctttgccgagctggattacaacatattccgcggcctggcgtttgcttccggcaacccgatttacggtctgattcttaacgggatgaaagggctgtatacgcgtattggtcgtcactatttcgccaatccggaagcgcgcagtctggcgctgggcttctaccacaaactgtcggcgttgtgcagtgaaggcgcgcacgatcaggtgtacgaaacagtgcgtcgctatgggcatgagagtggcgagatttggcaccggatgcagaaaaatctgccgggtgatttagccattcaggggcgataatcccttccgtttaaagagcaaacccctcaaacgaggggttttttgttgtttttacagatttcccattcttggcgggcaacgttccagcaactcgatgctgccgtcttcgttttgctgttcgagcatcacatcaaatccccacaggcgatgcacatgcttcagcacttctttgcgcccccgatccagcggtgcgcgattatgtggaatgtaacgcagcgtcagcgaacggtcgccgcgcaaatccacgttccagatctgaatattcggctccagattacttaagttatattgcgacgataaccggttacggatctcccgataaccttcttcattatgaatagcggaaatctccagataattatgccgatcatcatccagcacggtgaagaagcggaaatcacgcatcactttcggtgacagaaactggctgataaaactctcatctttgaaatcacgcatcgcgaaatgcagcgtttccagccagtcggaaccggcgatatccgggaaccagtatttgtcttcttccgttggcgactgacaaatccgtttaatatcctggaacatggcgaacccgagggcatacgggttgatgccgctgtaccacgggctgttataggggggctggaagaccacattggtgtggctgtgcaaaaactccagcataaaacgttccgttactttcccttcatcatacagatggttaaggatggtatagtgccagaaggtcgcccagccttcgttcatcacctgagtctgtttttgcggataaaaatactggctcaccttacgcacaatacgcaggatttcacgctgccatgattccagcagtggcgcatttttctccataaaatagagcaggttttcttgtggttcggacggatagcggcgcgcttcagcaaccgttttctcttcctcgcgcttcggcagggtacgccagagcatattgacctgactttgtagatactcttcgcgacttttctgccgggctttctcttcttgcagcgagattttttgcgggcgtttgtaccggtccacgccgtagttcatcagcgcgtggcacgagtccagaagccgttctacttcatcaacgccataacgttcttcgcactcggtaatatatttacgggcaaaaatcagataatcgacaatcgaactggcgtcggtccaactgcggaataagtaattgtttttaaagaaagagttatgcccatagcaggcgtgtgccatcaccagcgcctgcatggtaatggtgttctcttccatcaggtaagcgatacacgggttagagttaatgacgatttcataggccagtccttgctgaccgtgcttatacagccgttcagtctcgataaactttttaccgaatgaccagtgcggatagttaattggcatgccgacgctggagtaggcatccatcatctgttctgaggttatcacttcaatctggtgcgggtaggtatccagccggtagagtttcgccacccggtctatctctgccagataaacatccagcaggtcgaacgtccagtcgggtccatcgctcaaacgtgtggtgtccttattcatagaatcgatcgtcgccatacgcgcacctcattgttgtcggcgctctctgtgtggagcacctcatttcaagcatagaacacctgttaaaaaccgcgtcgccggagaatttttttctttgcgatttcttattatcagagtgccactaatccgcttctgaacggaattttatgctggataaaaagggcgttcagcaggagatactaaagacgccatattgccgcagagtcagggagatgtgagccagctcaccataaaaaagccgtatgttgaataatattttcaactgagttatcaagatgtaattagattattattcttttactgtatctaccgttatcggagtggctatgcgagttgtcatactgggaagtggtgtggtaggcgttgccagcgcctggtacttaaatcaggcaggacatgaggtcaccgtcattgatcgggagccgggggccgccctggaaaccagtgccgcgaatgccgggcaaatctcccccggatatgctgcaccgtgggcggcaccaggtgtgcctttaaaagcgattaaatggatgttccagcgccatgcgccgctggcggttcgtctcgacggtacgcagttccagttgaaatggatgtggcaaatgttacgtaactgcgacaccagccactacatggaaaacaaagggcggatggtgcgtctggcggaatacagccgtgattgcctgaaagcattgcgcgccgaaaccaatattcagtatgaagggcgtcagggtgggacgctgcaactgttccgtaccgaacaacagtatgaaaatgcgacccgcgatatcgccgtgctggaagatgccggcgtaccgtatcagctgctggaatccagccgcctggcggaagtggagcccgcgctggcagaagtggcgcacaaactgacgggcggcctgcagttacccaatgatgaaaccggagactgtcagctatttacccagaatctggcgcggatggcggagcaggcgggggttaaattccgctttaatacgcccgttgaccaactgctttgcgacggcgagcaaatctacggcgtgaagtgtggcgatgaagtgattaaggccgatgcgtatgtgatggcgtttggttcttactcgacggcgatgctcaaaggcattgttgatattccggtgtatccgctgaaaggctactcgctgactattccaattgcgcaggaagatggtgcgccagtatccactattcttgatgaaacctacaaaatcgccattacccgtttcgataaccgcattcgtgttggcggaatggcggaaattgttggttttaacaccgagctgttgcaaccgcgtcgtgaaacgctggaaatggtggttcgcgatctctatccacgcggcggtcatgtcgagcaggcgactttctggacgggtttgcgcccgatgacgccagacggtacgccggttgtcgggcgtacacgctttaaaaatctgtggctgaataccggtcacggcacgctcggctggacgatggcttgcggttccggtcagttgttaagcgatctgctctctggtcgcacgccagcgatcccatatgaggatctaagcgtagcgcgctacagccgtggatttacgccatcacgtccgggccatttacatggcgcacacagctaaggaaacgagatgacccgtccgatacaggccagcctcgatctgcaggcattaaaacagaatctgtccattgtccgccaggccgcgccgcacgcgcgcgtctggtcggtggtaaaagcgaacgcttacgggcatggtattgagcgtatctggagcgcgctcggggccaccgatggctttgcattacttaacctggaagaggcaataacgttacgtgagcgcggctggaaggggccgatcctgatgctggaaggatttttccatgctcaggatctggagatttatgaccagcaccgcctgaccacctgcgtacacagcaactggcagctcaaagcactgcaaaatgcgcggctaaaagcaccgttggatatttatcttaaagtgaacagtgggatgaatcggttgggcttccagcccgatcgcgtgcttaccgtctggcagcagttgcgggcaatggcgaatgttggcgagatgaccctgatgtcgcattttgccgaagcggaacatcctgatggaatttccagcgcgatggcgcgtattgagcaggcggcggaagggctggagtgtcggcgttcgttgtccaattcggcggcgactctgtggcacccggaagcgcattttgactgggttcggcctggcattattttgtatggcgcttcgccgtccggtcagtggcgtgatatcgccaataccggattacgtccggtgatgacgctaagcagtgagattattggtgtccagacgctaaaagcgggtgagcgtgtgggctacggcggtcgctatactgcgcgcgatgaacagcgaatcggcattgtcgccgcagggtacgccgacggttatccgcgccacgcgcctaccggtacccctgttttagtggacggcgtgcgcaccatgacggtggggaccgtctcgatggatatgctggcggtcgatttaacgccttgcccgcaggcggggattggtacgccggttgagctgtggggcaaggagatcaaaattgatgatgtcgccgccgctgccggaacggtgggctatgagttgatgtgcgcgctggcgttacgcgtcccggttgtgacagtgtaacttgttgtaagccggatcggagacagcgtcttctggttgcgaaaaatcatccatccggctggtcagcaactgtagttgttaatgtgacagagccattgcccatgatagtgtccattaaaagaatggacactatttccccggaacctgaactcaccgcacaggcgttctacataaaacgcttacgcttcattgttgactcgaactcgacttcagataaatcacgctttacccttgatggagcctgtacatagatttgtgtaattgcctgattttgatatgttcaattcaacatcaaatgaaggttaaattatggacgacaaacaattgcaggctcaggctgcgttcagcaaagcatcgcaaccggcgatagatgcttcattaaatttaagattcagcttcctcttcagccacccgtacgccaatcttcaacacttcattatcttctttctcggccaccgtccagatcatcccggcaaactctacctggtcaccgacaaccggtgccgcgcctaacaactgctggacaatttcacccagcgtttgctgcttatcacgatattctcgcccgtcttccaggccatatatcagcgcaacatcagcatatttggcgctggcttcgagaatgaagtcaccaaagaagcgttgatccagcgcgaccggcggcgactggctgaacagtttaccgagcgccggaagatcgcgttcccgaccaattacacacaacacatcgccttcgcgcagtcgggtgctgccggtaggatgaagcaactggttatcacgaaacagtgccgcaatacgcgtctcttttggcatatgcaaatcgcgcagtgccgcgcccacgcaccatttatcggcactcaattgataaacaaactgctcccacggattttccggatgaatatccaggccaacgcgtgacaccggacgtcccactggcggaaccaccactttggcttttttagccgcccacgagagtgatgttccctgcaagagcagtgaaaccagaaccacaaagaaggcgacattaaagaacagacgtgcattctccagccccgccatcatcgggaacacggccaggatgattggcaccgcgccgcgtaatcctacccagctgataaacacgcgctcacgcagattgaaaccgcggaaggggagcaatccagcaaataccgaaaggggacgggcgaagaatatcatccatgccgacaaaatgagcgccggaatggcaataggcagcagatcgcttgggttaaccaatagccccagcaccaggaacatggcgatttgcgccagccaggcgaggccgtcgaaattttgcaggatgccgtagcggttgcgaatcggccgattacccagcagaaaaccgcacagataaacagccagaataccgctgccttccagcgccgtggttaaagcaaaaattaaaataccgccgcttaatgccagcaatggatataatccggcaggcagggcgatgcgattaatcatttgcagcagtaaataaccaccgccaagtccgatgacaatcccgaggccaaattgctgcagaatatcgaccacgaacatccaactgacactgctttcatgttgctggatcatcgcaatcagggtaatcgtcagaaagaccgccattggatcattactgccggattcaatttccagcgtcgagccaacacgttcgttaagccccttaccacccagcagagaaaagaccgctgcagcatcggtagagccgacgatagcgccgattaataagccttcaatcaaatcaagattaaacagccacgccgccatcatgccggttaaaccagaggtgataagcacgcccagcgtcgccagcgacagtgccggtcctaacgccacacgaaaggaactggcctgagtgcgcatcccgccgtcgagcaaaataatcgccagtgccaggttacttaccatgtaggcgaaggggtaattatcaaacgggataccgccgacgccatcgactcctgccagcatgccgatcgccagaaaaataaccagaataggaatgccaagacgggaagaaaatgaactaagtaatatactgctggtgacaaggatggatcctaagatgaaaaggctaattattgttgtggcatccaacggtcggttactcctgattacgctgtctcttatataaaccctaccatattagcggcagagacagcgttttacttagccctgaagcgtgatttttttacattttaagaacaggatgaccgctaatcgtcaactgagtgccttcccgggtgttattcagaatggcatgtgcgcccaacggcagcgtaaccgtgcgttgttcatgaccaaaatcgaggccggtaatgagtggaatcgacaggcgggaacgcaaaaacgcgtacactgactccaggttgtaacctgcgtcataatcattgggcgtgctgccgctaaagctaccgagaataatcgccttctgacgtggcaaaattcccgcatgatagagctgcaacagcatacgttcgacgcggaaagggtgctcgttaatatcttccagcaccagaataccgttctcaatttttggcatccacggtgtaccaatcagtgaaatcagcatcgcaagattgcctccccacaacgtgccttcggtctgacatgtcgggccttccccttgccattcaatggtgaaggtttcattgcgtaacgccagccagaaatggtgctcggtaaaggcgttcagttcatccgcgccaaagtttgctaccagcatggggccgctaaaggtgatgacattgccttgcgccagaagaccgcactgaatggcggtaaaatcgctatgcccgcatatgagcaacgggtcatattgttggcgagcaaccagtgcctgccagtcaatatctgccagtaaacgactggcaccgtaaccgccgcgtacagccagcacgatggtgttgggggtggtcagtctggcaagggaattgagatcttccaggcgctccgtttccgtacccgcaaaacgctcacaacgacgggcaataacctcgacgttattgacctgatgcccctcgtcggtaaggcgctggataccacgcagcgcggcgtgctgtttaatgcagtaacccgatggggcaattaagtgaaacagagacatggcaattccttgctgacaacagaaacgaaatgtatatcatgccgcttaggtgtgccgttgtcacctcaacggcgattccaggctataaggatagaagaagtgaaattgagatggtttgcctttttgattgtgttattagcgggttgttcatcaaagcatgactatacgaacccgccgtggaacgcgaaagttccggtgcaacgtgcgatgcagtggatgccaataagccagaaagccggtgcagcctggggcgtcgatccacaattgatcacggcgattatcgctatcgaatcgggtggtaatccgaatgcggtgagtaaatcgaatgccattggtttgatgcagttaaaagcttcaacctccggacgtgatgtttatcgccgtatgggctggagtggtgagccgacgaccagcgagctgaaaaatccagagcgtaatatttcaatgggggcggcttacctgaatattctggaaaccggcccgctggcaggcattgaagatccgaaggtactgcaatatgcgctggtggtgtcatacgctaacggggcaggtgcgctgctacggactttctcgtcagatcggaaaaaggcgatcagcaaaatcaacgatttggatgctgacgagttcctcgatcacgtagcgcgaaatcaccctgcgccgcaggctccgcgctatatctacaaacttgagcaggcactggacgcgatgtaaatcagtcgcgcactttgtccgctttttcccgggcttctcgctcgagagagaaaataatccgctgtaattgccgctccaccgtcgggctgacgttaagaaaacggaagctcagacggggagtggtgatggtttcattcttgccatcaatcactttgcgctcgctgatggagattaactgggcgtcaaagtgaaaaacaccccattgcctcatgttgacttcaatctgagcgaagcgcatgccttcttgtaattcggcaggctttgctgtttccagtaatgcgcccatgccgcctaacgacaaatcatacaggtggaaacgtaacgtactgttatccgccagtttggtctggcaaaaataaggcggatggagtggggcggagatgcggaaatatcggcgtcgttgtacaaaccataaggtgggaggcggtacggtgataaatgccggaagctgcaagtattcactctgctgtagttgttcaacagtaaactcgactttcgcaccctgagtttcggcggtaatggtaatgtgctgtgcctttagcacggcgatgttgtcttcggcttgactgccgaaatccagcaccagtttatccggggttattgccagtattttgctgatcagctgcccgccattccaactgagacgcaaaggaattgcggctttgtgcaaatcgcgtaacacgcccaggacggctaacggattttgtttcaggaactgctcatggtaatgactcacgcggaaaaactcctgactgacaaactgtctttggtttatcggtcacagttaacaaaacttaatacaaatgcgtgaatattttttacatgttgttcttaaatcagccgacatacgcccagcatcgatcccgcccttgcctatacttagagcgttgatgtaagcatttcttgcgtccgattcatcgaaacgagggcctgaacatgggaattattgcctggattatttttggcctgatagccggcattatcgccaagctaatcatgccgaggcgtgatggtggtggatttttcctgacctgtattctcgggatagtcggtgcggtggtcggcggctggctggcgaccatgtttggcattggcggctccatcagtggttttaatctgcacagcttcctggtggcggtggtgggagctattctcgttctgggcatattccgcctcctgcgaagagaataagattttcataaggcggatagcgatacagatgccgctatccgctttcacatcagaacgtatactcgacacctgctttacgggtgaaaaaaatcaatatagcacttcgatatccgataaagtcggttcccggtaacaacaacagaatccttttttaattattgtttcgttgtttttggtgtgattcagaaaataaatattttagacagtagccagtcaggcgttaaaaatggggcggatagtgaggcggttttggctgcgcttattgaacatttagaattgatcaatccttctggcagattaagccaaaatacccgttcggcaatgcttcagttacgcgaagaggaatggtctgaattctttttttggttgctaaattctctggagtgtctggattatgtgattattaatttaactccagaaagcaaaaaaacgttgatgagtgaacaccgtaacaatattcaggtagcaattgatgctttatatagccaacgtcggcgtaaatcgccgggtgatgaaagtgaaacacttacccgtagaaatgacgctatcttcggcaaccacgtatggcaaacatttgcgcaatacttcccgccaggacttgaaaaaccgtctgtgtagaaaaaaccatagctatggtgttatctgccgacaacgccatccggagaagccgaatgacgttgtcggagtaagcgctggttaaggtgtgggttgtgcctctttggttgagggttgcgtcgttgctgacttaacggtcggacgcgtcgccggaacattgtcacacggttgctctttcgggcagatcaaatccagcattttcagcgtcacgccattggtccagccaaagccatcctgtaatggatattcgccaccgccgccccccgttccggtggtgctgacatcatatttttccaccagctttttctcccggtcataggtgtgctgaacattggtcaggaagtgccagctaatgtccatcgccacctctttttgcccgtagttttgtaatccttctgtcgcgacccactgtaacggtgcccagccatttggcgcatcccattgttgcccacttttcaccgacgtggtgttcaggccgccgggttgcagcagatgtgttttcgtcgccgtcgccattttgttggcgcgatctttcgctgccgcattgacgtacagcgggaacagggcggccgcggttaactgattgcgcactttatgacttttcaggtcgtaatcggcataccagccttgttgatcgttccacaggtatttttcgatccctttttgacgggcatttgccagcgtttcgtactggtttgccatcgcgttatctccggcagctttgctggcgcgggcgaggattttttccattttaaacatcaggctgttcagatcgaccggtacgatgctggtggtgcgtaaggtatttaactgctgcgggttgtccatccagcgcgagctgaaatcccagccagacgcagcggcagagcgcaggtcgcggtaaatttcagtggcaggtcgattcggattgcttttggcggtggcaatatcttccacccatgactctggtcgtggcgtatcgcgatcgtcccagtagcggttgagaagggtaccatcctgaagtttgacaacgcgtttttcctgttgtccggcttgcaggttttcaacaccgtccatccagtaagcatattctttttgcatttgcggcaggtattgcttcaacgcggcatcgccttcatgctgcgccagtaactctaccatcagggcaaagaagggcggttgcgagcggcttaaatagtaactgcggttgccgttgggaatatgaccgtaagtgtctatttcatgagcaaaattggccaccatatccgcgactttatcccagtgaccgctttcggcaagtcctaacatggtgaagtaactgtcccagtaatatacctcgcgaaaacgtccgcccggcacgacataaggttccggcagcggtaacagagaatcccatttttcggtgttttcggtagaacgcgttaataccggccaaagtccgtcaatatgttcgcgcagtgactgcccctctggcggaacatatttctcgccttctttcggcagggtgaaattgacgttaacgaaatggcgcagatcaaatccgctctggttttgctgcatccgataatcagcaaggatcatcagcggatcgctgttcggcacggcatcggcaaaggttttttggtccggaaaaagtttggcgttttgcacatcattaaacagcggccctaataaaatatcaggcggctgtggtgttaccggtgtttcttctgcctgcaccgatagcgcagcgaaacacaaaaagatacaggctggaattaacgccattttttgcgggcgagaaggtgcgggggatttcatcaatcattctcctttggcgaaaccgaataaaacggtattcaagtatcagaaaaccttagttcaggatcgcactagctgcatgatcgaaatctcattctgcgaactgtcaggcattttagaaaagggaattaaagggataaataacggcgaaatagagtgatcaaataacgtctgtttattagccagccagcgacatttggttcgcgattagcgaagaaaaatcatcataaattggtaaaaaatataacaggtagttaaaaaacatcagtgctgggtaaattgccggatgacatcagaacgatgccatccgaacggtggcttaaccctgacggttgaaacgttgcgttttaacgtccagcgttagcgtttcttctggttgtatcgcatacagtttctcaccctgctggcaaatccagccaatccccagttcacgggcgattagggcgctgtgggataccggacttccggcgctaaggcagataccttttacaaccgccggatccagttgcagtactgtggaaggataaatgttctccgccagtagaatagttggcgagttaaactgcgggagttcttctttcgtttgggtcaggtggaccagggtgcgatgcagaagatcgtccacatcaatatagcgagcttgtagatattcatcatccagttgctggtattgctggctaagttctttaagaacttgctgccaggcatattctgccgtgcaatgttcatgctgaaggagttcgcttgccgccgccagcagttccggatcatctaacagtgtatggtgaccagaaaagattgcggcaatatcgtcaagcccgctggcttctgcttttgctgttaacgtcatcagatctaataacgtgaagtcaatagcctggcgtaatcgatcttgttcttcttccacggtcagggttgattttgcctgtaccgtacataaaactggttgataataaaaggctttacccgaaacaggcggaacgggacgcagagtaggtggagcgacttcctccgtttcaccaaagttatcttcagccagctgacggaaagcgatcagtgcctcttcagcttctggccctttcgcaatcaggcgcagcgtatcgttatagcgaacttgtagtaacgcaatctggttaatactctctggtgtgacgcatttgccgtttttttccagcaacatatcggcattaaatgtcgataaggtataaaccagccgggaggccggacgtacatgcaggccgttacggttttttatgaccaccgccagagaacgggcttcttcatcgtacgcaggacatgtgtcagagattttagtgtcggaggacggtaaacccagttgttcacgtttggcttccagcgcatgcatagcgtcaaagataactttgtcgatatccgctcccgaggccgcgctgaccgttgctgccagtgtaccttcgaccaacggcgcagcacacaaacgtacttttgcggcgatcttgggagccagcaattccagcgccagtttcagcactcaataatgcgctacccatatccatcatgaccagcacatggtcggcatcagcaacagattcgatggcctccatcactttgacggcatcggtaccaataggattttgtggatcgtcaattcccgcggcaatggcgattttacaactatcactcattaacatctgacgggctaattcaccgacaccttctcccagtcggctgctatgtgaaactatgaccaggtttaccatcaccaattccttactcttttgcggctaacgccaacatttgcatcataaacatcaccgaggtcgcgccgggatcctggtgaccaatactgcgttcaccgagataactggcgcggcctttgcgggcttgcatcgtaatcgtactttgtgcagcggattcggcgattctactggcagcttcgagcgccaccggaacagagagattttgctcgctggactgacgtaacgattccaccaccggcacccacacatcacacatggttttatcgccaggttcggctttcccgcgactgattacgccgtccacgccatcgcggaacatctgataaagctcttccagtgtcaggctttgccgtgcctgggtcgcctgtgcggcgcggataaagaaggtaccgaacagcggaccactggcaccaccgacgctggaaagcagcgtcataccggtattcttgagaatgaaaccgatatctttatctgcgatagcagggagtttttccaccactttgctaaagcctcggttcatatttagcccgtggtcagcgtcgccaatttcgcgatccagtccggtaagatactcgctctcggtgctgaaaatatcgccacaacgagtgagccagttaacaatttgagttctgctcagtgacattgctttctccttatttaccccagttaagggccggggtgtggaccggggcgtcccagagtgccagcgtttcgtcatcaactttcagtaaggtgattgagaaaccggtcatatccagtgaggtgcagtacgcgccaattaaattacgttcgatagtcaatcccgcttgctggcaacgtgtggtcaggcggttatagacgccgtacagctcagaaagcggagttgcgccaagattgttaaccagcgcaatcacccgatcgccagactggagcggttgtttggtttgttgttcttcctgccaactgccttgttgataatcccagaaacgcaaagtgcgatggtatgagccattttccagcagggtgtcgaacatttcatcgacggtttgatcaagggaagagaaggagcggcggtcaatacccggctcaccatgaatgccgacgccaaactccatctcattatccgccagggtaaaagaaggtttgcccgcggcaggaacggtacaggcaccgagagcgatacctattgagtggccttgattattcaacttacgccccagttccgcacaggcgtccagtgagtcgccacgctccgccgctgcgcctacgagtttttcaattaatacggtgttggcaacgccgcgtcgcccggcggtataaagactgtcttttaccgcaacgtcgtcatcaatgaccacagtggtcacttttacgccgctatcgtgcagtaactcggtcgctgtttcaaagttaagaatatcgccggtgtaatttttgataatcaacagtacaccttcgccgccatcaatttgcatggcgcattcaaagattttatcgggcgtcggtgaggtgaaaatttcgcccggacaggcccccgaaagcatcccctgaccgatataaccacagtgcatcggctcgtgtccgctgccgccacccgacagcagggcgacttttcctgcaacaggggcatcagctcgggtgacatacaccggatcctgatgcagtgtcagcgatggatgcgctttcgccagtcctgccagttgttcgtccagtacgtcttgcacatcattgatcaattttttcattattttgctccagcaattacggtagggcatggatgatgttcaacgacacggcgaccactgactgccgatgaatccattgtgcatcaggcaagggaaaagaaaattagcccaaattatgtttcatagtgaaacatatgctttaatgaatgttccatattgaaacttttacgtgtattaatacttaaaattgcgagccggaacaccttttgtcataagggatgcgggatatgagtggcgcttttaacaacgatggtcggggcatatctcccttaattgcaacctcctgggagcgatgcaataagctgatgaaacgggagacatggaacgtaccacatcaggcccagggcgtgacatttgcttctatttatcggcgtaagaaagcgatgctgacgctcgggcaggctgcgctggaagatgcctgggaatatatggcaccgcgagagtgtgcgctgcttatcctcgatgaaaccgcctgcattctcagccgtaatggcgatccgcaaaccttgcagcagctaagtgcactgggattcaatgacggcacgtattgcgccgagggaattattggtacttgtgcgctatcgttagcggctatctctggtcaggccgtgaaaacgatggccgatcaacatttcaaacaggcactctggaactgggccttttgtgcaacgccgttgtttgacagcaagggccgattgacgggaacaatagcgctggcgtgtccggttgagcaaactaccgcagctgatttgccgttgacgttggcaatcgcccgcgaggtcggtaatttactgctgacggacagtttgctcgctgaaactaaccgtcatttaaatcaacttaatgccctgttagaaagtatggatgatggcgtgattagctgggacgagcagggtaatttgcaatttattaatgcccaggcggcgcgggtcttgcgccttgacgcgacggcaagtcagggacgggcaatcactgaactcttaacgttacccgccgtattgcaacaagcaataaaacaggcacatccgctcaaacacgtagaagcaacctttgaaagccagcaccagtttattgatgcggtgataacccttaaaccgataatagaaacgcagggaaccagctttattttgttgctccatcctgtggaacagatgcggcagttgatgaccagtcaattaggaaaagtcagccatacctttgctcatatgccacaggacgatccgcaaacccgccgcttgattcattttggtcgccaggcggcgcgcagtagctttcctgtcctgctttgtggagaagagggcgtgggcaaggcactgctaagtcaggcaattcataatgaaagcgagcgtgctgcaggtccttatatcgccgtcaattgtgagttatatggtgatgctgcgctggcggaagaatttattggtggcgatcgcacggacaatgaaaatggccgtctgagtcggctggaactggcacacggcggcacgctgtttcttgaaaagattgaatatctggcggtggagttacagtctgctttgcttcaggttatcaagcagggggttatcacgcgactggatgcgcggcgtttaataccaattgatgtcaaagtgattgccacaacgaccgcggacctcgcaatgctggtggaacaaaatcgttttagtcgccagctgtattacgcgctgcatgcatttgaaattaccatcccgcctctgcgtatgcggcgtggcagcattccggcgctggtgaataacaaattacgcagtcttgaaaaacgcttctctacgcggctgaaaattgatgacgatgccctcgctcgcctggtttcttgtgcatggccaggcaacgattttgaactttacagcgtcatcgagaatcttgctctgagtagtgataacgggcgcattcgcgtcagtgatttacctgaacatctgtttaccgagcaggcgacagatgatgtcagcgccacccgcctttccaccagtctgtcatttgcggaagttgaaaaagaggcaattattaacgcagcccaggtcacaggcggtcgcattcaggaaatgtcggctttacttgggatcggccgcactacgctgtggcggaaaatgaagcaacatggcattgatgcagggcagtttaagcgccgggtatgaaagacagaaacgatttctgatacatcagagtgatctgtatttcattccggcgcacgctaacaattttcagcatcgtttaagggcttgtctatcccgcacttaaaagctgaagcgatatcctccgttgacttgcttctgatcaaagaggttaccctgcgtgtaatccgcttcgagatagaatgtgtgctgtttgttatactgtgcactgactcccacgccgttattccagccattacctttgaaactgtacttctcccgggagttgttcaacagatattcggtatcccctgaaaactcgcggatagcgccagtcttcacatagacattcagctggctgttgcctgcggtgatgtcataccccagtatcatgctggcacgccccagcagcgattcgtagtgattcagatgtatattgaggccattactcgccttcatagccatctcattctggtggctgtatgtaagctgggtttgcggctctatatagaacccataaccagtaggggacaggttgaacctctgcccggcttccagggagatgctcattccattcgcagtgccgttggcgttaacgccgttgttctgactgtccagtacgtggaaactatttttctggcgcgatgcttttataacgagatcgctgtaaaaaccgttttgtgccatgtaactggcgtacattcccatgtagtctgaacgtgcggtaccgtcgcctccgctatagtccggcgatgcatgtgttgagccaatatacagaccgacatacaacggcattacatcagagagacgtttatccccaccaaactggataccgctgtaacccatgtcaaagccgctcagtttgccactggcaaaggagtccaggcttcccccataactgcgcaaccagatattaccgtctttactctgatttcgcaggtcacccatccgttgcatcagcgtacggttttcaacatagttcaataagtaaccgacattgagataattgccgccagcatctgcggtcgtggtgggtttaggcgtgggagcgggttcaggcgtaggatcggggttgactatgggaggctgagcgggagctggtgtgggttcaggattaggagtcggttccggaactgtcccggaagcgtaaagctcccagttagtgccatttttacgcacatcgtacagatatccccccaactcaacctgagaagacgcgctgaacgaggccgcgccgtcagtggtttttaccactgtcagaacttcatttcccgttgtggcctcgctgccctggttgcggatagccaatacgtgattaccagcactactcccgctgatattcaataaatcccctttattattaacgccattaccctcgccaacaacatcagcacgcataataaaggtactgttaccgctcaggttctctacgtttaatgtggcaaatgtgccggcagttgacccgtggctggcaaaatcgacagttgaatggctcagcgccagcgtgtcgagattagaattacttgttacgttccagacgctgttattcattgcaacgtccagttttccgccattgacattatcgctgagggaggaacctgtccaaaccgacccagggtgcatatccagattgattagcccacctttggaaagaacgctaccgttgataagcatacgacccgaggcgttgatgcggctggcggcataaccatcgtcatgttgcgttgcaatggccatctggtcgggtgtactcatatcaatgaccagatcgctcgtgaggtcgatctggctgttggtcatggcataaattcccctggctcctgccgcgccggtgatagccaaactgtctccggttattctaccgccgctgagcgcccacaaacccagcgccagactgccattacgatcaactgtaatatcggtattttgcatgttgacaacagccgttgccgtctgggccgaggcaccataagaaccgccggaaaagatgctgtttcgttgcgccgccgtgccagaaaaattgattgtcgcgtctgaaccactggtgacgaggccaccgccctgcgcggaagaaatatggctatctgcaccgatagtggttgtaccaccacgaacttcgacgccattggccgcggctccagttacatcaacagtgagtgcattcgcgctaacctggccaaagctccagaggccgtgtgcattatcgccattggttttaatggaactgtttgttccgagatcgacaacagagtttttctgtacgtttatccccatggcgctgtagccctgaacatcgattgtcaggtctgtagccgtaaaacgcgcagcaccattggcgttattgccgttgagaccaccgatataaacacctgtacttccatcggtcgtgattttacttccgcttccaagatcgacactggtgccatagtcattgatggttaggcctataccgttcgagttttcaatggtgaattgagtggctgttagtgttgagctatgcccaataatgatgccgtcatcgttactcttaatggtgctgcctgtgcctaagtcagcatgggtatagtcaccaattaagttaatgccgatggcagaggtttgaccaacaacatctactgtgagtcggttagctgtcagggagctgtttttgccctgaataatgattccttttgcatatccagaggcgtcgttgacattgacggtgacatcattacccaggttgatattgccaggcgtgtttcctgctggggtcattacaccatagaggtttcctgatggatcggcggtatctcctgtaattctgtcaccatcattaatagtaatattggtgccatattgacttcctgtatcagcagctatcagcaggggggaaaagataattgcattcaaaccaatagcgccaaattttatcagttgaattgagggcgaacggatttttaattcagcgagacgatctgctttggtattcccattgtgttgtttgatgcccataccactcctatatagtacccagactatgggtctatggattttgtcattttgtttaaatcaatgaataatatcctcttatcatcatgatatttgtatggtgcactcatgatgagcttctcagagaataattctctattaccgggcaaaatcaggaacacaggagttaatatatatttaacatcccccttacaaaggtgagtttatatcgagttattccctaagttgtcgttacttattccaattcgttactataaatatggcaaaatattacaacaaacagcggttaaaaaatttggtgaagattttttgtaataatcctaattagttatgggaatttcgcttgatgtatctgcataacaaaaacaatatgcgccatttttgcattactaataagaaaaagcaaaaaacatcgatattcattttgggtcaatgggttttctggcctatcgttgttattgtgctactggttatcattttcatcttgccagcatattggagcgtgatcaattttgatcagctgtgaaggtggctgatgtgtagtgatacaaaaacttacgttatatcactgctaatgagatatccgtcatctgaacacttatgtctttaattattctcgtggttcactataggcaataagcacaaaagtgtaggatgttacaagaatgattaggactcggtgaaatgaaaaatccacgcaattgcgtggattttatatacttttgcgctcttcatgagatttagcgaaacctcatgagacaacaaattaattagacgttgaaaaggaagttcatcacatcgccatctttaacgatgtaatctttaccttctgcacgcattttgcctgcttctttcgcgccttgttcacctttgtaagtgatgaaatcttcaaacgagatggtttgtgcacggataaagcctttttcaaaatcagtatggattttgcccgctgcctgcggcgcggttgctccaaccggaatggtccatgcacgcacttctttcaccccagcggtgaagtaagtttgcaggttcagcagcttataaccggcacggatcacacggttcaggcccggctcttccagcccaagctcctgcataaactcgtcacgttcttcgtcgtccagttcggcaatgtctgcttcaacagcagcacaaaccggaaccacaacagaaccttctttcgccgcgatttcacgcacctggtcaagatatgggttgttttcaaaaccgtcttcgttgacgttggcgatgtacattgttggtttcagcgtcaggaagctcaggtaacgaatagccgctttctcttcagcgcttaaatccagcgcgcgcagcatacctgcattttccaactggggcaggcatttttccaggaccgccagctcagctttcgcgtctttatcgccacctttggctttcttctgtacgcgatgaatcgcacgttcgcaggtgtcgaggtctgccagcgccagttcggtgttgataacttcaatatcgtcagccgggttaactttgccggaaacgtgaatgatgttgtcattttcaaagcagcgaacaacgtgaccgatcgcttcggtttcacggatgttggtcaggaactggttacccagaccttcgcctttcgatgcgccttttaccagaccggcgatatcgacaaattccatggtcgtgggaagcgtacgttgcggttttacgatttcagccagttgatccaggcgagggtcaggcattggtacgacgcctgtgttcggctcaatggtgcagaatggaaagttggccgcttcaataccggctttggtcagcgcgttgaacagggtagatttcccgacgttgggcaaaccgacgataccgcatttgaatcccatgatttaaatcaccttaatatcttaataatcaacctgttattgctaacagattgcagaaatggaaataactttgcctattatacacggcactcggcaaaaatgccgcagacaacgacttattgcgctttaaaggcgtgcaatcggttcgttgctttggtcaagccatctgtaaaccacatttcagtacaacgcgccgcttcgtcgatggcttcatcaattaacttctgttcactaacaggcggtttgcctaacacaaaaccgacaactttatttttatcgcccggatgaccgattccgatgcgtaaacggtgaaagttagggttattacccaatttactgatgatgtctttcagtccattgtgaccaccatggccaccgcccaatttaaatttggcgacgccaggaggcagatccagttcgtcgtgggccaccagaatttcgtccggattaatgcggaaaaaactggccatcgccgcaacggctttgccgctgagattcataaatgtagtcgggactaacaggcggacatcttcgcctccaagagtgactcgcgaagtataaccaaagaatttagcctcttcgcgcagcggagcgcgcaaacgctctgccagtaagtcaacgaaccaggcaccagcattatgtcgcgttgcggcgtattcagcaccggggttcgccaggccgacaatcaatttaatcgtcacgtttttttgtcctgagtgtgtacataactggcgcgtagtttactggttgcggccccgcttgacaaaaactgcgaatcaaatgcagataacgtaataattgcatgagtggactattagaaagtcaaggtgttcaggcgtttatttgtaaagttttgttgaaataagggttgtaattgtgatcacgcccgcacataacccacagggtgttgtctatactttacacataaggaagaggggtattccctgttacaacccagaaagttccggaggtgacatatgaaacgcaaaaacgcttcgttactcggtaacgtgctcatggggttgggtctggtggtaatggtggtcggcgtggggtattcaatcctcaaccagttaccacagtttaatatgccccagtatttcgcacatggtgcagtgctaagtattttcgtcggtgccattctctggctggcgggtgcccgtgttggcgggcatgaacaggtgtgcgaccgttactggtggttcgccactatgacaaacgttgccgccgtagcgataatcgccgtcatagctaacaaataatgcagtttgctgaccagtcagtttgcgctgactggtcaatctcgtacttataaatccgccatcgccgcgcgacgattcgggaagaacgccaggcgtcccgggatcggttgaatgccagcgcgagccatagtgcgcagtggctggaattccacgttgcacacgcgcagttcacatccctcgggcagacgcttcacaaaacgctggaacgcatcaagaccaccagcatcaagtaccggaaccgcatcccacttcagaatcacaatccgtttgccttcaagacgtgactccaggtccgtgaacaagccttcagcagcagcaaaaaacagcgggccaataacgcgcagaaccaggacatcgtctggaacatctacgactaccggtgccaggcgagtcatacgtgcgatacgacgcataaacagcagcgatgccagcacgatccccacgctgatggcaataaccatatcaaacagcacggtcagcgacatgcacagcagcatgacaatgatgtcatctttcggcgcatgacgcagcaagtcgaccactttgtgcgcttcactcatgttccacgccaccatcaacagcagggcagccatggcggaaagcggcagccaggagagcagcggtgccagtaccagcagggcaagaataaccagaatagagtggatcaccgccgagataggggaagttgccccggcacggacgttagcggcagaacgcgcgatggcagctgtagcggtaatgccaccaaagaacggagcgatgatattccccagtccctgtccaaccagttcgctattcgccttgtgtttcgtcccggtcataccatccagcaccacggcgcagagcagagattcgattgcgccgagcattgccattgagaatgccgcaggcagcagtgtgcgaatagaatcccaggttagcgtgaattctgaattaggcagatcccacggcagcaccagttgcggcagcagttgcggaataccgttaccctgagaaccatcggccaggacgtagtggaattgcgaaccgatggtagcaacatgtccgccgagcaggttaacaatccccatcaccgcgcaaccagccagcaaggccggaaggtgaccgggtaaacgaatgcccagacgcggccagaaaacaagaatacctagcgtcacaatgccaatggcagcatcacccacattaatggtcggcagcgccataaataatgcgccgactttttgtagataatgttccgggacatgggccatttgcagaccgagaaaatctttaatctgcatggtaccgatggtgatcccgatacccgaggtgaaacctaaggtgacggaaaccggaatatactcaatcaggcgaccaaagcgtgccagacccatcagaatcaaaaaaatccccgacagcaaggtcgcaaccagcagtcctgccagtccaaactgttgcgacacgggatagagaattaccacaaatgccgcagtcggaccggaaacgctaaagcgtgacccacccgtcagagcaatgacaatccccgcaacagctgcggtatataaaccgtactggggtgccacaccactaccaatagccaacgccatcgccagcgggatagcaataatcccgacggttatcccggcaatcaagtcacgggtaaaccgtgcggcagtatatttttctttccagcaagcgtcgatcagagcgcggaaaggcatcacatgtgaggaaaatattttgttcacaataatgtttcatccgtgagcgcatcatctgtcaactaaatggcaggtgaaggaggcataggtcatacaaatggatattacagacaaaaaaacccgccgcagcgggtctttgagccgggttcgattagtgttcgaacatggcagagatcgattcttcgttgctgatacgacgaatcgcttcggccagcatacctgacagggtcagagtacgcacgttcggcagtgatttgatttcatcgctcagcggaatggtatcgcagacaacgacttcatcaattacagagttacgcaggttattcgccgcgttgccagagaagatcgggtgagtcgcgtacgcaaatacacgtttagcaccacgttctttcagagcttcagcagctttacacagcgtaccgccagtgtcgatcatatcatcgaccagtacgcagtcacgacctgcaacgtcaccgatgatatgcatcacctgggaaacgttcgcacgcggacgacgtttgtcgatgattgccatatcggtatcgttcagcagcttagcgatagcgcgggcacgcacaacgccgccgatgtccggagaaaccacaattgggttatccagattcagctgcagcatgtcttccagcaggatcgggctaccaaatacgttatcaaccggaacgtcgaagaaaccctgaatctgttcagcgtgcagatccactgtcagcacacggtcaacaccgacgctggagaggaagtctgcaaccactttcgcagtgattggtacacgagcggaacggacgcgacggtcctggcgcgcatagccaaagtaggggataacagcggtgatacgacctgcggaagcacgacgcagggcatcaaccataacgactaattccatcaggttgtcgttagtaggggcacaagtggactggatgatgaaaatatcaccaccgcgtacattttcgttgatttgtacactgacttcgccgtcgctaaagcgacctacagcggcgtcgccgagtgaagtgtacaggcggttggcaatacgttgtgctagttccggggtggcgttaccagcaaaaagcttcatatcaggcacgagaagaacctcaggcatgcgtccattggtggaaagaatctgccgaaaactgtgcgggccaggcatgatcctttccaggcggtgtattaaagagcgcgatgcaacgtctggaacaaggtgacgttgtcaccgaaactcagcttgcccggcttaaagcatggctctgtgcaatggggaaagattaacgcctttcgccacaaagccattgagccattccgggggcttgctctagcacctggcgggcttcagactctgtatcaaattcagcaaagacacaggcccctgtcccagtcaggcgcgacggggcgtattctaacagccaggaaagcaccgcatcaacctcgcgaaaacgttttcttgcgataacctcgcaatcattgctgaattcacattttagcaacgtttctattgacctttttggcgtattgcgcgggagttcaggatctttaaaaatcaccggagtcggaatacttacaccagggtgcgccaccagataccacttctctggcggatccaccggcgttagtatttcaccaacgccttcggcaaacgcggcatgcccccgaacaaagacaggaacatctgcgcccagcgtcagccccatttccgccagctcatccatgcttagcccgcattgccagagataatttaatgccaccaggaccgtcgcggcattggatgaaccaccgccgagaccgccgcccatcggcaaacgcttgtcaatgctgatattcgcaccgcttcccgtcggaagacgcccgctgtctgccgcagtttttatcaacaatcgcgctgcgcgaacgatcaggttatcttcatgttccacgccttcaacgggcgttaacagacgaatatccccatcgtcacgaagctcaatgctgatggtgtcgccgtaatcaagaaactgaaacagcgtttgcagcgtgtggtaaccatccgcacgctgaccggtaatgtataaaaacagattaagttttgccggagagggccactgtgtccgcattatttcactatccagttatccatttttaacttgatgcgttgaccaccgtcggtgagttccatattggctggcatcgcaggttgcgttttggtgtcataaccaccataaacaaccttccagtttttgccattctggctgtaggtaatttcgctcaggcggtactggtcgtccagtttgtagtcggttgcatcacccggtaaacctaaaatccactggcgcaagctgttgagcggaattggcattccggtcaatttgccaatcatctcttcggcgtcatcggcggtataacgctgacctttattgtcgactaactgcacgttacccggttgagcattcagctccagttccgtgctgcccaatgggttagtgagcagcagacggtagcgatcctggccggtttgctgccagaaaaagcgggcgtacactttttgttggtcagaaatataagcgaacgcgccgcgagtctgatactgattaagattgcgcacgtcttgctgatgctgacgccattgtggcgaatccgggcttttgccaggacctttgggcgtggtaacggaacaggcagtgagcacaagagcagccagcggtagcaggcggataagacgaaaatcgggcaggggcatagtgatgacaagtccttgagatacgttgcagttataacccttaatgctagcgttaccgtccgctatcgtctatgttcaagttgtcttaattgccagaatctaacggctttcggcaattactccaaaagggggcgctctcttttattgatcttacgcatcctgtatgatgcaagcagactaaccctatcaacgttggtattatttcccgcagacatgacccttttagcactcggtatcaaccataaaacggcacctgtatcgctgcgagaacgtgtatcgttttcgccggataagctcgatcaggcgcttgacagcctgcttgcgcagccgatggtgcagggcggcgtggtgctgtcgacgtgcaaccgcacggaactttatcttagcgttgaagagcaggataacctgcaagaggcgttaatccgctggctttgcgattatcacaatcttaatgaagaagatctgcgtaaaagcctctactggcatcaggataacgacgcggttagccatttaatgcgtgttgccagcggcctggattcactggttcttggggagccgcagatcctcggtcaggttaaaaaagcgtttgccgattcgcaaaaaggtcatatgaaggccagcgaactggaacgcatgttccagaaatctttctctgtcgcgaaacgcgttcgcactgaaacagatatcggtgccagtgctgtgtctgtcgcttttgcggcttgtacgctggcgcggcagatctttgaatcgctctctacggtcacagtgttgctggtaggcgcgggcgaaaccatcgagctggtagcgcgtcatctgcgcgaacataaagtacagaagatgattatcgccaaccgcactcgcgaacgtgcccaaattctggcagatgaagttggcgcggaagtgattgccctgagtgagatcgacgaacgtctgcgcgaagccgatatcatcatcagttccaccgccagcccgttaccgattatcgggaaaggcatggtggagcgcgcattaaaaagccgtcgcaaccaaccaatgctgttggtggatattgccgttccgcgcgatgttgagccggaagttggcaaactggcgaatgcttatctttatagtgtggacgatctgcaaagcatcatttcgcacaacctggcgcagcgtaaagccgcagcggttgaggcggaaactattgtcgctcaggaaaccagcgaatttatggcgtggctgcgagcacaaagcgccagcgaaaccattcgcgagtatcgcagccaggcagagcacgttcgcgatgagttaaccgccaaagcgttagcggcccttgagcagggcggcgacgcgcaagccattatgcaggatctggcatggaaactgactaaccgcttgatccatgcgccaacgaaatcacttcaacaggccgcccgtgacggggataacgaacgcctgaatattctgcgcgacagcctcgggctggagtagcagtacatcattttctttttttacagggtgcatttacgcctatgaagccttctatcgttgccaaactggaagccctgcatgaacgccatgaagaagttcaggcgttgctgggtgacgcgcaaactatcgccgaccaggaacgttttcgcgcattatcacgcgaatatgcgcagttaagtgatgtttcgcgctgttttaccgactggcaacaggttcaggaagatatcgaaaccgcacagatgatgctcgatgatcctgaaatgcgtgagatggcgcaggatgaactgcgcgaagctaaagaaaaaagcgagcaactggaacagcaattacaggttctgttactgccaaaagatcctgatgacgaacgtaacgccttcctcgaagtccgagccggaaccggcggcgacgaagcggcgctgttcgcaggcgatctgttccgtatgtacagccgttacgccgaagcccgccgctggcgggtagaaatcatgagcgccagcgagggtgaacatggtggttataaagagatcatcgccaaaattagcggtgatggtgtgtatggtcgtctgaaatttgaatctggcggtcatcgcgtgcagcgtgttcctgctacggaatcgcagggtcgtattcatacttctgcttgtaccgttgcggtaatgccagaactgcctgacgcagaactgccggacatcaacccagcagatttacgcattgatactttccgctcgtcaggggcgggtggtcagcacgttaacaccaccgattcggcaattcgtattactcacttgccgaccgggattgttgttgaatgtcaggatgaacgttcacaacataaaaacaaagcgaaggcactttctgtacttggtgctcgtatccacgctgcagaaatggcaaaacggcaacaggccgaagcgtctacccgtcgtaacctgctggggagtggcgatcgcagcgaccgtaaccgtacttacaacttcccgcaggggcgcgttaccgatcaccgcatcaacctgacactctaccgtctggatgaagtgatggaaggtaagctggatatgctgattgaaccgattatccaggaacatcaggccgaccaactggcggcgttgtccgagcaggaataatggaatatcaatactggttacgtgaagcaataagccaacttcaggcgagcgaaagcccacgccgtgacgctgaaatcttattggagtatgtcactggcagggggcggacttttattctggcctttggtgaaacgcagctgactgacgaacaatgtcagcaacttgatgcgctactgacacgtcgtcgcgatggtgaacccattgctcatttaaccggggtgcgagaattctggtcgttgccgttatttgtttcgccagcgaccttaattccgcgcccggatacggagtgtctggtggagcaggcactggcgcggttgcctgaacaaccttgccgtattctcgatctcgggacgggtaccggggcgattgcgcttgcgctggctagcgagcgcccggactgcgaaattatcgctgtagatcgtatgcctgatgctgtctccctggcacaacgtaatgcccagcatctggcgatcaaaatatccacattctgcaaagcgactggtttagcgcgctagccgggcagcagtttgcgatgattgtcagcaatccgccgtatattgacgagcaggacccacatcttcaacaaggcgatgtccgctttgagccgctcactgcgctggttgcggcagacagtggaatggcagacatcgtgcatatcatcgaacagtcgcgtaacgcgctggtatccggcggctttctgcttctggaacatggctggcagcagggcgaagcggtgcgacaagcatttatcctcgcggggtatcatgacgtcgaaacctgccgtgactatggtgataacgagcgcgtaacgctcggccgctattatcaatgacaagtttttctacactgcttagtgttcatcttattagtatcgcgctttctgttgggctattaaccttacgtttctggctacgttatcagaagcatccacaggcatttgctcgctggacgcgcattgtgccgccggttgtcgatacggtgttattgttaagcggcattgcgttgatggctaaagcgcacatcctgccattttccgggcaggcacagtggctgactgaaaagctgtttggagttatcatttatatcgttttgggttttattgcactcgattatcgtcgtatgcacagtcagcaggcgcgcattattgccttcccgctggcgttggtggtgctgtacatcatcattaaactcgccaccacaaaagtaccgttactggggtaagtcatgagatcgttagctgatttcgaatttaataaagcgccattgtgcgaaggcatgatcctggcttgcgaagcaatccgccgcgattttccctcgcaagatgtttacgacgaactggagcgtctcgttagtctggcgaaggaagaaatcagccagcttctgcctttagaagagcagctggaaaaactgatcgcgctgttttacggcgactggggatttaaagcctcacgcggcgtttatcgtctttccgatgcattatggctggaccaggtgttaaagaatcgacagggcagtgcggtatcattaggtgcggttttattatgggtcgcgaatcgtctcgatttgccgctgctgccggtgattttccctacgcagctgatattgcgcattgaatgtccggatggcgaaatttggctgattaatccttttaacggtgaatcgttaagcgaacatatgctggacgtatggttaaagggaaatatcagcccgtcggcggaactgttttatgaagaccttgatgaagctgataacattgaggtaatccgcaaattgctggatacactcaaagcctcgttgatggaagaaaatcagatggagctggcgttacgcaccagcgaagctttattacaattcaaccctgaagatccctatgaaattcgcgatcgcgggttgatttatgcgcaactggattgcgaacacgttgcgttgaacgatttaagttatttcgttgaacagtgtccggaagacccgatcagcgaaatgatccgtgcgcaaataaataacatcgcgcataaacatattgtgctgcattaattaatcgacattttactcaagattaaggcgatcctatgaaacaaaaagtggttagcattggcgacatcaacgtagcaaatgacctgccgttcgtactgtttggcggtatgaacgtgctggaatctcgcgatctggcgatgcgcatttgcgagcactacgtaactgtgacccagaaactgggtatcccttacgtgttcaaagcctcttttgacaaagccaaccgctcctccatccactcttatcgtggaccgggcctggaagaagggatgaaaatcttccaggagttgaagcagacttttggcgtgaaaattatcaccgacgttcacgaaccaagtcaggcacagcccgttgctgatgtcgtggatgtgattcagttgccggcgtttcttgctcgccagactgacctggttgaagccatggcgaaaaccggtgcggtaattaacgtcaagaaaccacagtttgtcagcccgggacagatgggtaatatcgttgataaattcaaagaaggcggcaacgaaaaagtgattctttgcgatcgtggtgctaacttcggctatgacaacctggttgtcgatatgctgggcttcagcattatgaagaaagtgtctggtaactcgccggtgattttcgacgtgacccacgcactgcaatgccgcgatccgtttggcgcagcttccggtggtcgtcgtgctcaggtggctgagctggcacgagccggtatggcggtaggtctggcggggctgtttattgaagcgcatccggatccggaacatgcgaaatgtgatggtccatccgcgctgccgctggctaaactggaaccgttcctcaagcagatgaaagcgattgatgatctggtgaaaggtttcgaagaactggataccagcaagtaatcttttttgcttgaaaaataaagtcttagcgttctgcgttaagacttttttcatgggtgccagatacaaaaaaggccgcaggctgttacccctgcggccggtttcgggcgcatattgccatcacggcagcctgacgcccgttttcaccttacttccggttacgccaccagccgacaatcgctgcggtaataatccccgccaggatcggtgctgccaggtcgtgccagaaaatcatggcaaacttcgcgagcgtcatatagccgccttgttgtaatgacaacattttgcggctattcttgaattgttctggttcaagattagcccccgttctgttgtcaggttttacctctcaacgtgcgggggttttctctttccagcaaccaatgccaccagggataaagcccccgcaacattgcgcctcaccggataattccggcttggtgtggatactacgactcaattcatcttcacttcatccctgaaatgtttgcaatgaagagtgcattccggtttttcaacagctgttacagtcgtttcatgagggctctggatgatgcttccagctcgggttgccaatatttacttgtggaagagataaagacaaaaatggccgcaggctgttacccctgcggccggtttcgggcgcatattgccatcacggcagcctgacgcccgttttcaccttacttccggttacgccaccagctgacaatcgctgcggtaataatccccgccaggatcggtgctgccaggtcgtgccagaaagtcatggcaaactgcgcgagcgtcatatagccgccttgttgtaatgacaacattttgcggctattcttgaagtgtctggtttcaagattagcccccgttttgttgtcaggttttacctctcaacgtgcgggggttttctctttccagcaaccaatgccaccagggataaagcccccgcaacattgcgcctcaccggataattccggcttggtgtggatactacgtctcaattcatcttcacttcatccctgaaatgtttgcaataaagagtacattccggcttttcaacagctgttgcagtggtttcgtgcaggttgtggtacaggctcgcaattctgattaacgagctgtccaggtagtatgaagaaatacaataagcaggaatttatcttatctcccccgatttccgtcatcggaggagatataactgtcaggcaaatatcgtcatcaaataggcggcaaacagtgccagatgcgctgcgccattgagcacgttagtacgtccggtggagaaggagatatggcacagcactaaagaggccaccatcaccaccatttctggcgcaccaagtgcaaactgtaattcgttacccgtcataaaggcaattagcgtgacgacaggtacggtaagcgaaatggttgctaacactgaaccaaagaacagattcatcgcgcgctggacctggttgttcaacactgcttttaacgcacctaaaccttccggcgacagaatcaacagagccaccaggaagccagtaaaggcgacaggggcattcatgctgtcgagcaatgtctccagcgggctggcattcattttggtgactgcaataacggcaatcagatggataatcaaccagatagcatgccacacgctgctatgggcagacggtttaccgtgatgcgggtcatcgtcatcactgtcatcttcgtgctcgtagacaaacaaactttgatgcgttttggtctggatcagcaaaaatacgccatacattgccgcagaaattaatgctaccagtaacgcctgaccggttgaaaaattcgccgcaggcagagccattggaaataccagtacgattatcgccagggggaacagcgcaattaaatactgcttgataccaaacagattcatatattgggtggcaaacttacgaccgcccaacaataatgaaaagccaaccagcccaccggtaacaatcataatgattgaatagagcgtatcacgcattagcgttggcgcggcgtcgccggttgccattaaagctgaaatcaaactgacttcaagaataaccactgaaaggctaagaataagcgaaccgtaaggttctcccaggcgatgggctaatacgtccgcatgacggacaacactaaaggcgctacttaaaataccaataagcgcaagaagattgatggcaatgaccactggtagtgtctggctgcttccccacaggaacagcactaccagcgccagaaccgggaaaataagcgaagtctccttgtggcgggtttttaccgcctcttgagcatttgacattatggttatccctttgcagatgaatttatcgaaaatgtaaaaaataggtaggaaaaataacagaaagtgtctggatatcggtaacattttacgaatttttaccccactgtcgattttttactcattgggacataaaaataagtattacgtttagacaatgtttgttttagcgtttcttaagaacagtctgacatgaaaattcttatgttttggcaagagtagatattgttgaccacacttaatgttcaactttgtaaaaggagtcaacgatgccgtataaaacgaaaagcgatctgccggaaagcgtaaagcacgttctaccgtctcatgcccaggatatctataaagaagcgttcaacagcgcatgggatcaatataaagataaagacgatcggcgtgatgacgccagtcgcgaagaaaccgcgcataaagtggcctgggctgctgtgaagcatgaatatgccaaaggggatgatgataaatggcataaaaaatcgtaaaaccggtagcttagttaaagctattcgtgcggtgttgccttgcaagtggtccgtggattgcatattgtcccgttagtggtttcaaaatgagcagtaaaaatgtccggaagacaccaaaaagttgtcgcagggaagtatgcagtggcggaggtgtaaggtgataacgcgtgatttcttgatgaatgccgattgtaaaacggcatttggtgccattgaagaatcactcttatggtcagcagagcaacgggcggcttcgctggcggcgacgctggcttgtcgacctgatgagggaccggtgtggatcttcggttatggatcgttgatgtggaatccggcactggagtttaccgagtcgtgcaccggtacactggttggatggcatcgcgcgttttgcctgcgcctgaccgccgggcgcgggactgcgcaccagccgggacggatgcttgcactgaaagagggcggacgcactacaggcgtcgcctatcgactgccagaagagacgctggagcaggaactaaccctgttgtggaagcgcgagatgattaccggctgttatctgccaacctggtgtcagcttgatcttgatgatggatgcacagtaaacgccattgtgtttattatggacccgcgacatccagaatatgaatctgacactcgcgctcaggtcatcgcgccgttgattgcggcggcgagcggtccgctgggaaccaacgcacaatacctgttttcactggaacaggagcttatcaaactgggaatgcaggacgatgggctgaatgatttgctggtatcggtaaaaaaactgctggcggagaattttccggatggtgtgttacgtccgggattcgcctgagtaaacttcccgcatagtggggcgtcagacgccccctcaaacattaaaatgtgagcactttatcggctgacagcgtccattgcgccagttccacaagagtaccgatttccaccccatcaatcagaggaagtgtactaatcccgcgcccgtcggtacaggttttgcacaatttcaccggtacattctgagcggtaaggatctccagcatttgctgaatgttgtagccttcccctggtttttgcccgcgcaacccggctgtgaccgcatcagacatgaggaacagacgcagatccagattgctctcctgctctcgtaacgcaatggccagccgcaagctgttaaacaaggattcgctcccgtaaggtgcgccattggcaacgatcacgattttttgcattatttactcctgtattcagggaattagacactcatcttctatcttactgcttctgcagcgtctgaccaatcggtcacatttttaaggattttcctgaaagcgcgagaaaatacgacaaaagttgccagtaatcgttattctttaaggctatggtttttcattattaccggaagttaccgacgttttgagccgtttcgttcctcgcattatcccgttttatttactcttgcttgtagcaggcggtacagctaacgcacaatctaccttcgagcaaaaagcggcaaatccctttgataataacaatgatggtctgccggatttaggcatggctcccgaaaatcatgatggggaaaaacactttgctgaaattgtgaaagatttcggcgaaaccagtatgaatgataacgggctggatactggcgagcaggcaaaagctttcgcattgggaaaagtccgcgacgcgcttagtcaacaggttaatcagcacgtagagtcctggctatcaccgtggggaaatgccagtgttgacgtcaaagtggataacgaaggacatttcaccggcagtcgtggaagctggtttgtgccgttacaagataatgatcgttatctcacctggagccagcttggtcttactcagcaggatgatgggttggtgagcaatgtgggcgttgggcaacgctgggcgcgcggcaactggctggtgggttataacactttttatgacaacttgctggacgaaaatcttcagcgagcgggctttggtgccgaagcgtggggcgaatatttgcgactatcggcaaacttttatcagccgtttgctgcatggcatgaacagacagccacgcaggaacaacggatggcgcgcgggtatgacctgacagcccggatgcgcatgccgttctatcaacacctcaataccagtgtcagcgtagaacagtattttggtgatcgtgttgatttgtttaactctggtacgggttatcacaatcccgtcgcgttgagtctgggattaaattacacccctgtgccattagtcactgtgacggcccagcataaacagggtgaaagtggcgagaatcaaaataacctcgggctgaatcttaattaccgctttggtgtaccgctcaaaaaacaactttctgcgggcgaggttgccgaaagtcagtcgttacgtggtagtcgctatgacaatccgcagcgaaataatctaccgactcttgagtaccgacagcgaaaaacgttaacggtgtttctggcgacaccgccgtgggatctaaaacctggcgaaacagtgccgctgaaattacaaatccgcagtcgttacggtattcggcaactgatttggcagggcgatacgcagatattaagtttgacgccgggcgcacaagccaacagcgcggagggctggacgctgatcatgcctgactggcagaacggggaaggggcaagcaatcactggcgattgtcggtggtggtggaagataaccaggggcagcgtgtctcctccaatgagatcacgctaacgcttgtcgaaccgttcgatgcattgtcaaacgacgaactgcgctgggaaccgtaatcagaaaatgcgctcctgatgcacccataccgctgcttccacgcgagacttgagcttcattttcttcagcatgtgcttgacgtgcacttttactgtgctttcggtgatatccaggcggcgggcaatcatcttgttcggcaaaccctgggcaatcagcttgagaatatcgcgctcgcgtggggttaactggttaacatcgcgctcagtagtggcacggttagcgcgcaagctggcggccagaacaggcgttaatgcttcgcttaataccatttcgccagcagctgcctgatgcaatgctttcagcagatcttccggttccatatcttttaacagatagccatccgcgccgcgtttcagtgcggtgaccacatcttcttcatggttagagacgctgaataccacaatgcgccctgagagggacttttcgcgcagtttatccagcgtttccagaccgttcatgccgggcatattgagatctaacaggatcagatcgggatcaagagattccgccagttcaataccctgttcgccattactcgcttcgccaaccacggtgatatctggtgccatactgataagctgttttacgccagttcgcagcatcgggtgatcgtcaatcagcaggatagtagccggttcctgattactcatgggtatctccttggacgtctgtgaaagttttttcgggaataaaggtgaccaccacttcggtgccacctgattcacgacggcggacgcggcaatcgcctcgtaaactttgcgcacggtcgcgcattattatcatgccgtagtgattgctgcggatggcattttcaggcacgccgcagccgttatcctggacggtcagtttgacctgattatcgttttgcgccaccgtcaccacgacttcactcgcttgcgaatgtttgagggcgttacttaatgcctcacgggcaatttgcaacaagtggattgcctgatgcgaaggcaccagacgaggcggcaattgataatccagcttcaccgggaagccaaatttggcgctgtactcttcgcaactcgcctccagcgccggacgtaatccaggctcggtgagctgcaagcggaatgtggtgagcaattcacgcaactgcgcccaggatgcattcagttcgttacggatctgacttaacagttcgcggctgctttctggcagcgcatcgccctgcatctgtaaacaactcacctgcatcttcatacaagagagagattgggcaatagaatcatgcagttcgcgcgcaatggtggcacgctcttccatcacgatcaactgttgctgacgttcctgatggcgatccaacgccagcgtggcggtgagttgttcaaccagggtatccaccagttgttgttgatcatggctaagatgacgcccctgcggcagggtcgccagcaaaataccgtactgcgtatgagagtcagccagccgccacttcagggttgtgccgcgatcgccaacgggtaatacgccgcgcgggcagagctggcagcctttatcatcacaagtcatatctggctggcaggtaaactcctgatgattctcttcatcatcagtatcataaacccgcagttcgatatcacgtagcagggttaaattctgtaagccgttgagtaccggtgacaggcgttcacacagcggggcgcgggaatgcaaacggcggttagcctgccataaaaatgagaggatctgatttttatgctccagcccggcggttttctcctgaacccgctgctcaagtacggcataactttcggccagttctgcagacatattgttcaacgcagttccaagcatcgccatttcgttgcgcccgctgatgtttgcgcgttgggtaaaatcgcgatggctgacggcactcgccattgccagcagttgccgccacggttgtagcagtcgcgcccgcaaccagataatagtgaacaccagtaaaagtgccataaataccgccattacccgatggaccagtaccactgtctcgatgcgcatttccgtggtgcggtcaaaaccagataccagctgatcaagcccggcaacaaactggctgacatccgctgacaccgtttctcggttttgtgcacgcatcagcgcagggatcagttcattacgccagtaatcttgtaaaccctgtaattgcgccagttgtccgtctcgttctgctgctcgagtcaactcggcgctaaatgccgtttgttccatctctttaattaagggcttgtctttctcgcttaatggcactgccgccaacagacggtaactttgcatgcgcagcgatcccgctttgttgatcgcatgggcgctgccctgaacgccttgcaccagccagccagaaaccgccatccctgccagtccaatagcagtagaaagcaacacaataagcgcaacctgattaaccagggtgagcggagagagacaacgtttaagcatgtaaacctcttccttcaggctttaaatgagcaataaccttaatgaatgtgacgatgcattctggaatggcagtattctcggctattggctgaagtatacccatacccggaaagagttactccttatttgccgtgtggttagtcgctttacatcggtaagggtagggattttacagcaccgtgaaaaatctcataatttttatgaaatcactgtactcactatgggtaatgataaatatcaatgatagataaagttatcttatcgtttgatttacatcaaatagcctttagctacagacactaaggtggcagacatcgaaacgagtatcagaggtgtctatgagtcactcatccgcccccgaaagggctactggagctgtcattacagattggcgaccggaagatcctgcgttctggcaacaacgcggtcaacgtattgccagccgtaacctgtggatttccgttccctgtctgctgctggcgttttgcgtatggatgttgttcagcgctgttgcggtgaacttaccgaaagtcggttttaattttacgaccgatcagctatttatgttgactgcgctgccttcggtttctggcgcgttattacgtgttccatactcctttatggttcctatcttcggtggtcgtcgctggacggcgttcagcaccggtattctgattattccttgcgtctggctgggttttgccgtgcaggatacctccacgccttatagcgtcttcatcatcatctctctgctatgcggctttgctggcgcgaacttcgcatccagtatggcaaacatcagcttcttctttccgaaacagaagcagggtggcgcgctgggtctgaatggtggtctgggaaacatgggcgtcagcgtcatgcagttggttgctccgctggtggtatcactgtcgattttcgcagtatttggtagccagggcgtcaaacagccggatgggactgagctgtatctggcgaatgcgtcctggatatgggtgccgttccttgccatcttcaccattgcggcgtggtttggcatgaacgatcttgctacctcgaaagcctccatcaaggagcagttgccggtactcaaacggggtcatctgtggattatgagcctgctgtatctggcaaccttcggctcctttatcggcttctccgcgggctttgcgatgctgtcaaaaacgcagttcccggatgttcagattctgcaatacgctttcttcgggccgtttattggtgcgctggcgcgttctgcaggtggtgcattatctgaccgtctgggcggaactcgtgtcacgctggtgaactttattctgatggcgattttcagcggcctgctgttcctgaccttaccgactgacgggcagggcggaagcttcatggcgttcttcgcggtcttcctggcgctgttcctgacagctgggctgggtagtggttccactttccagatgatttcagtgatcttccgtaaactgacaatggatcgcgtgaaagcagaagggggttctgacgaacgtgcgatgcgtgaagcggcaaccgacacggcagcggcgctgggtttcatctctgcgattggcgctattggtggcttctttatcccgaaagcgtttggtagctcgctggcattaacgggttcgccagtcggcgcaatgaaggtatttttgattttctatatcgcctgcgtagtgattacctgggcggtatatggtcggcattctaaaaaataaaccgttactcgtcatacttcgggttacatgtgctgcggctgcgttcattcaccccagtcacttactttagtaagctcctgggattcattcacttgccgccttcctgtaaaccgaattatatagagtaaaatatttgattatcctttgcgcggcatgatgtcgcgctttttttatgcgttatttagttacaacatactaatgttatatggcttatttcgccggatttcattaagagccattaatatgttacccatggggaatactccttaatacccatctgcataaaaatcttcatgctttaaataactacaggtataaaacgtcttaatttacagcatgttatgctttaactgttaattatcctaaaggggtatcttaggaatttactttatttttcatccccatcacacttgatcgttatcaattcccacgctgtttcagagcgttaccttgcccttaaacattagcaatgtcgatttatcagagggccgacaggctcccacaggagaaaaccgatgagtaaattcctggaccggtttcgctacttcaaacagaagggtgaaacctttgccgatgggcatggccagcttctcaataccaaccgtgactgggaggatggatatcgccagcgttggcagcatgacaaaatcgtccgctctacccacggggtaaactgcaccggctcctgcagctggaaaatctacgtcaaaaacggtctggtcacctgggaaacccagcagactgactatccgcgtacccgtccggatctgccaaaccatgaacctcgcggctgcccgcgcggtgccagctactcctggtatctttacagtgccaaccgcctgaaatacccgatgatgcgcaaacgcctgatgaaaatgtggcgtgaagcgaaggcgctgcatagcgatccggttgaggcatgggcttctatcattgaagacgccgataaagcgaaaagctttaagcaggcgcgtggacgcggtggatttgttcgttcttcctggcaggaggtgaacgaactgatcgccgcatctaacgtttacaccatcaaaaactacggcccggaccgtgttgctggtttctcgccaattccggcaatgtcgatggtttcttacgcatcgggtgcacgctatctctcgctgattggcggtacttgcttaagcttctacgactggtactgcgacttgcctcctgcgtctccgcaaacctggggcgagcaaactgacgtaccggaatctgctgactggtacaactccagctacatcatcgcctgggggtcaaacgtaccgcagacgcgtaccccggatgctcacttctttactgaagtgcgttacaaagggaccaaaactgttgccgtcacaccagactacgctgaaatcgccaaactgtgcgatctgtggctggcaccgaaacagggcaccgatgcggcaatggcgctggcgatgggccacgtaatgctgcgtgaattccacctcgacaacccaagccagtatttcaccgactatgtgcgtcgctacaccgacatgccgatgctggtgatgctggaagaacgcgacggttactacgctgcaggtcgtatgctgcgcgctgctgatctggttgatgcgctgggccaggaaaacaatccggaatggaaaactgtcgcctttaataccaatggcgaaatggttgcgccgaacggttctattggcttccgctggggcgagaagggcaaatggaatcttgagcagcgcgacggcaaaactggcgaagaaaccgagctgcaactgagcctgctgggtagccaggatgagatcgctgaggtaggcttcccgtactttggtggcgacggcacggaacacttcaacaaagtggaactggaaaacgtgctgctgcacaaactgccggtgaaacgcctgcaactggctgatggcagcaccgccctggtgaccaccgtttatgatctgacgctggcaaactacggtctggaacgtggcctgaacgacgttaactgtgcaaccagctatgacgatgtgaaagcttacaccccggcctgggctgagcagatcaccggcgtttctcgcagccagattattcgcatcgcccgtgaatttgccgataacgctgataaaacgcacggtcgttcgatgattatcgtcggtgcggggctgaaccactggtatcacctcgatatgaactatcgcggtctgatcaacatgctgattttctgcggctgtgtcggtcagagcgggggcggctgggcgcactatgtaggtcaggaaaaactgcgtccgcaaaccggctggcagccgctggcgtttgcccttgactggcagcgtccggcgcgtcatatgaacagcacttcttatttctataatcactccagccagtggcgttatgaaaccgtgactgcggaagaactgctgtcgccgatggcggataaatcccgttataccggacacctgatcgactttaacgtccgtgcagaacgcatgggctggctgccgtctgcgccgcagttaggcactaacccgctgactatcgctggcgaagcagaaaaagccgggatgaatccggtagattacaccgtgaaatcccttaaagagggttccatccgttttgcggcagaacaaccagaaaacggtaaaaaccacccgcgcaacctgttcatctggcgttctaacctgctcggttcttccggtaaaggccatgagtttatgctcaagtacctgctggggacggagcacggtatccagggtaaagatctggggcagcagggcggcgtgaagccggaagaagtggactggcaggacaatggtctggaaggcaagctggatctggtggttacgctggacttccgtctgtcgagcacctgtctctattccgacatcattttgccgacggcgacctggtacgaaaaagacgacatgaatacttcggatatgcatccgtttattcacccgctgtctgcggcggtcgatccggcctgggaagcgaaaagcgactgggaaatctacaaagccatcgcgaagaaattctccgaagtgtgcgtcggccatctgggtaaagaaaccgacatcgtcacgctgcctatccagcatgactctgccgctgaactggcgcagccgctggatgtgaaagactggaaaaaaggcgagtgcgacctgatcccaggtaaaaccgcgccacacattatggtcgtagagcgcgattatccggcgacttacgaacgctttacctctatcggcccgctgatggagaaaatcggtaatggcggtaaagggattgcctggaacacccagagcgagatggatctgctgcgtaagctcaactacaccaaagcggaaggtccggcgaaaggccagccgatgctgaacaccgcaattgatgcggcagagatgatcctgacactggcaccggaaaccaacggtcaggtagccgtgaaagcctgggctgccctgagcgaatttaccggtcgtgaccatacgcatctggcgctgaataaagaagacgagaagatccgcttccgcgatattcaggcacagccgcgcaaaattatctccagcccgacctggtctggtctggaagatgaacacgtttcttacaacgccggttacaccaacgttcacgagctgatcccatggcgtacgctctctggtcgtcagcaactgtatcaggatcaccagtggatgcgtgatttcggtgaaagcctgctggtttatcgtccgccgatcgacacccgttcggtgaaagaagtgataggccagaaatccaacggcaacccggaaaaagcgctcaacttcctgacgccgcaccagaagtggggtatccactccacctacagcgacaacctgctgatgctgactttaggtcgcggtggtccggtggtctggttgagtgaagccgatgccaaagatctgggtatcgccgataacgactggattgaagtattcaacagcaacggtgctctgactgcccgtgctgttgtcagccagcgtgttccggcagggatgaccatgatgtaccacgcgcaggaacgtatcgttaacctgcctggttcggaaattacccaacagcgtggtggtatccataactcggtcacccgtatcacgccgaaaccgacgcatatgatcggcggctatgcccatctggcatacggctttaactactacggcaccgtaggttctaaccgcgatgagtttgttgtagtgcgtaagatgaagaacattgactggttagatggcgaaggcaatgaccaggtacaggagagcgtaaaatgaaaattcgttcacaagtcggcatggtgctgaatctcgataagtgcatcggctgccacacctgttcagttacctgtaaaaacgtctggaccagccgtgaaggcgtggaatacgcgtggttcaacaacgtggaaaccaagccgggtcagggcttcccgactgactgggaaaaccaggaaaaatacaaaggcggctggatccgtaaaatcaacggcaaactgcagccgcgcatgggtaaccgtgccatgttgctgggtaaaatcttcgctaacccgcatctgccggggatcgacgattattacgagccgttcgattttgactatcagaacctgcataccgcgccggaaggcagcaaatcgcagccgattgcccgtccgcgttcgctgattaccggggaacggatggcgaaaatcgaaaaagggccgaactgggaagatgacctgggtggtgagtttgacaaactggcgaaagacaagaacttcgacaacatccagaaggcgatgtatagccagttcgaaaacacctttatgatgtatttgccgcgcctgtgcgaacactgcctgaacccggcatgtgtggcgacctgcccgagcggtgcgatttacaagcgtgaagaagatggcatcgtcctgatcgaccaggataaatgccgtggctggcgtatgtgcatcaccggatgcccgtacaaaaaaatctacttcaactggaagagcggtaagtctgagaagtgcatcttctgctatccgcgtattgaagcgggtcagccgaccgtgtgctcagaaacctgtgtcggtcgtatccgttatcttggcgtgctgctgtacgatgccgacgcgattgaacgtgcagccagcaccgagaacgagaaagatctttaccagcgtcagctggaggtgttcctcgatccgaacgatccgaaagtcatcgagcaggcgattaaagacggtattccgctgagcgttattgaagccgcacagcagtcgccggtttataaaatggcaatggaatggaaactggcgctgccgctgcatccagaatatcgcacactgccgatggtctggtacgtgccgcctctgtctccgattcagtctgcggcagacgcgggtgagctgggtagcaacggcattctgccagacgtcgaaagcttgcgtattccggtacagtatctggcgaatctgctgaccgccggtgataccaaaccggtactgcgcgcactgaaacgtatgctggcgatgcgtcattacaaacgtgctgaaaccgttgacggtaaagttgatacccgtgcgctggaagaggtcggtctgaccgaagcccaggcacaggagatgtaccgttatctggcgattgctaactacgaagatcgctttgtggtgccgagtagtcatcgtgaactggcacgggaagccttcccggagaaaaatggctgcggctttacctttggtgatggctgccacggttcagataccaaattcaatctgttcaacagccgtcgtatcgatgccatcgatgtgaccagcaaaacggagccgcatccatgatcgaactcgtgattgtatcgcgtctccttgaatatccggatgctgccttatggcagcatcaacaagagatgtttgaggcgattgctgcgtcgaaaaatctgtcgaaagaagatgcccatgcgctgggcattttcctgcgcgatttaacggcgatggatccgctcgatgcccaggcccagtacagcgaactgttcgaccgtggccgcgccacgtcactgttgctatttgaacatgttcacggtgaatcccgtgaccgcggccaggcgatggtggacctgctggcgcagtacgagcagcacggcttgcagttaaacagccgcgaattaccggaccatctgccgctgtatctggagtacctgtcgcagctgccgcaaagcgaagccgtggaaggtttgaaagatatcgcgccgattctggcattgctgagcgcgcgtctgcaacagcgtgaaagccgttatgccgtgatgtttgatctgctgctgaaattggccaataccgctatcgacagcgacaaagtggcggaaaaaattgccgacgaagcgcgcgatgatacgccgcaggcgctggatgctgtctgggaagaagagcaggttaaattctttgctgacaaaggctgcggtgattcagcaatcactgctcatcagcgtcgctttgccggtgccgtcgcgccgcaatatctgaatatcaccaccggaggacagcactaatgcaattcctgaatatgttcttctttgatatctacccgtacatagccggggcggtcttcctgattggtagctggctgcgttatgactacgggcagtacacctggcgcgcggcgtccagccagatgctggatcgcaaagggatgaacctggcgtcgaacctgttccatatcggtattctggggatttttgttggtcacttcttcggtatgctgacgccgcactggatgtatgaagcctggctgccgattgaagtgaaacagaaaatggcgatgtttgctggtggtgccagcggcgtgctgtgtctgattggcggcgtgctgttgctgaagcgtcgtctgttcagcccacgcgtgcgtgcaaccactaccggagcggatatcctgatcctgtcgctgctcgttatccagtgcgcgctgggcctgttgaccattccgttctccgctcagcatatggacggtagcgagatgatgaaactggttggctgggcgcagtcggtggtgaccttccacggtggcgcttctcaacacctcgatggtgtggcgtttatcttccgtctgcacctggtgctggggatgacgttattcctgctgttcccgttctcgcgtctggtacacatctggagcgtaccggtggagtatctgacacgtaagtaccagctggtgcgcgctcgtcactaagcgaattttagttcacatagaccctgcttcggcggggttttttatgggcacggtgcggggtgagttgtcggatgcgcttcgcttatccgacctacaggggaggatattgtaggcccggtaaacgtggtgccatcgggcaaaattggctcggagtaacaggttttgattatttaaggaagtgatggtggtgggggaaggattactcaacgctgcgcgcttcgcccttcgggtcgttgcctgcggcaacgctctctcgctggcgctcgagtcgaaccttggtcgaggcttctcatccttccccgcatgggcagaatatttaatcgcggattcgtttgagagttcacggacttttgaaagtgatggtggtgggggaaggattcgaaccttcgaagtcgatgacggcagatttacagtctgctccctttggccgctcgggaaccccaccaggggtaattcaaattttgaggtaatacttgagatggtggtgggggaaggattcgaaccttcgaagtcgatgacggcagatttacagtctgctccctttggccgctcgggaaccccaccacggggtaatgctttttactggcctgctcccttatcgggaagcggggcgcatcatatcaaatgacgcgccgctgtaaagtgttacgttgagaaaaatgaactggttgcgtaattttcatccgtaacggattaaaggtaaccagttatttttgctggcgattaaagaataatcgtccgattaccgtaaacaaagacgcgctgtgccagtactttgtatagcgcacgacttaagacgtttttctcgacgtcacgacctgcgcgcatcatatcttcagctgtgtaggtatgatcgacatgaataacgtcctgcatgatgattgggccttcgtccagattgtcattcacatagtgagcggttgcgccaataatcttcacaccacgttcataggcctggtgataaggacgtgcgccgataaacgcaggcaggaatgaatggtgaatattgatgattttattcgggaagcgtgccacaaattccggcgttaatacccgcatatacttcgccagcaccacatagtcaggttgataagcatcaatggcgtccgccatcttttgatcgtgctcgttgcggcttaacccttcatggcttaccagctcaaacggaatatcaaaacgctcaaccagagaacgtaaagtatcgtggttaccaataactgccgcgatttcgacatccaggccgccgtaattggctttcatcaacaaatcgccaaggcaatgcgcttctttagtgaccagaatcactatccggcgacgaccggcaggattcagctcacgcacggagccttctggcaatgcgctatcgagatccgccagcagggtggaatcattaaaaatcccttccagttccgtgcgcataaaaaagcgcccggtacggtgatcaacaaattcattgttctgtacgatatttaactcgtgcttgtagcaaatattggtaatacgtgcgatcagacctttttggtccggacaaatagtacgcagaactttacgttggagtgaatgcattgctggaaaaaccttgttgagagtgtttgctaaaccgtaccgtcaaccattattggccgcagcactttttaaattttttacctgaaccacaagggcagggatcgttgcgaccaaactgcggacgtgtaccgtcaatatagtaccattgaccgttttctttcaaaaatcgcgaacgttcaattattgcacctgttttaccaccttcggtaaatcgagcaacaaaactgacaaatccgatattgtcggcgtcctgccaacaatgttcaaatacggtcaatcccaaccattcagtatgcgcaaatccggccatcaattcggcacgtaacgccgctgctccacaagagggatgccaggtctttattaaataatctgcgtcttgcatcacaaaagcgcagtaacgcgaacgcatgagatgttctggatcaggtgcaaccttttcaccagacacataagggtggcaacataggctatactcgacagcactaccacagggacaaagctgagacacaaataatctccctggaaacaataacggcgtattaaccgcctgagtagcactatgttaaccgagcagtagcgatgtggctacgattgcattccaggggaatcttgcgggaataatgagaaagataaaaatagggctggcgttgggatctggcgcggcgagaggttggtcgcatattggcgttattaatgcgctaaaaaaagtgggtattgaaattgatatcgttgcaggatgttcaattggttcgctggtgggcgctgcctatgcatgcgatcgattatctgcgctggaagattgggtgacctctttcagttattgggatgttttacgcctgatggatctctcctggcagcgcggtgggttactgcgcggcgagcgtgtcttcaatcaataccgcgaaataatgccggaaacagagatcgaaaattgttcccgtcgctttgcggctgttgccaccaatttaagtacgggacgtgaattatggtttactgaaggcgatctccatcttgctattcgcgcatcatgcagtattccaggactcatggcacctgttgcacataacggctactggctggttgatggagcagtcgttaacccaattcctatttccctcacgcgtgcattgggggctgatattgtgatagcggttgacctgcagcacgatgctcatttgatgcaacaagatttgctctcctttaatgtcagtgaagaaaatagcgagaatggtgattctctgccgtggcatgcgcgtctgaaagaaaggttaggcagcataacgacacgtcgggcggtgacagcgccaacggcaacagagattatgaccacttctatccaggtgctggagaaccgccttaaaaggaaccgcatggcaggtgatccgcccgatattctgattcaacctgtttgcccgcaaatatctacgcttgatttccatcgcgcgcacgctgccattgcggccggacagctggcagtggaaaggaaaatggacgaacttttgccgttggtacgcaccaacatttgaccagaatttttatctacacttaagttaattctgacaggcgcaggtggcaatagcatgccactattgagtaaagccagtcaggggagagaacatgacgcagccattggtcggaaaacagattctcattgttgaagatgagcaggtatttcgctcgcttctggattcatggttttcctcattgggagcgacaacggtactggcggctgatggggtggatgcccttgagttgctgggaggtttcactccagacctgatgatatgtgatatcgcgatgccacgaatgaacgggcttaaactgctggagcatatacgtaacagaggcgaccagaccccagttctggtgatatctgccactgaaaatatggcagatattgccaaagcgttacgtctgggcgttgaagatgttttgctgaaaccagttaaagatctgaatcgcttgcgcgagatggtttttgcctgtctctatcccagcatgtttaattcgcgcgttgaggaagaggaaaggctttttcgcgactgggatgcaatggttgataaccctgccgcagcggcgaaattattacaggaactacaaccgccggttcagcaggtgatttcccattgccgggttaattatcgtcaattggttgccgcggacaaacccggcctggtgcttgatattgccgcactttcggaaaacgatctggcattttattgccttgatgtcacccgagctggacataatggcgtacttgctgccttgttattacgcgcattgtttaacggattattacaggaacagcttgcacaccaaaatcaacggttgccagagttgggcgcgttattgaagcaggtaaaccatttacttcgtcaggccaatctgccggggcagtttccgctattagttggctattatcatcgcgaactgaaaaatctcattctggtttctgcgggtctgaatgcgacgttaaataccggcgaacaccaggtgcaaatcagtaatggtgttccgttaggcactttaggtaacgcttatttgaatcaattgagccagcgatgcgatgcctggcaatgccaaatatggggaaccggtggtcgactgcgcttgatgttgtctgcagaatgagcaaacgataacgcgggctaaatttgcattacctgctaatgtcggctggtggtactatcgtcgccattcgtataagtaattgtcttaattatgctaactcgcctccttttcagaacttagccccttcggggtgctgatatactgggatgcgatacagaaatatgaacacgttcaaaacacgaacagtccaggagaatttaaatggctgccattaatacgaaagtcaaaaaagccgttatccccgttgcgggattaggaaccaggatgttgccggcgacgaaagccatcccgaaagagatgctgccacttgtcgataagccattaattcaatacgtcgtgaatgaatgtattgcggctggcattactgaaattgtgctggttacacactcatctaaaaactctattgaaaaccactttgataccagttttgaactggaagcaatgctggaaaaacgtgtaaaacgtcaactgcttgatgaagtgcagtctatttgtccaccgcacgtgactattatgcaagttcgtcagggtctggcgaaaggcctgggacacgcggtattgtgtgctcacccggtagtgggtgatgaaccggtagctgttattttgcctgatgttattctggatgaatatgaatccgatttgtcacaggataacctggcagagatgatccgccgctttgatgaaacgggtcatagccagatcatggttgaaccggttgctgatgtgaccgcatatggcgttgtggattgcaaaggcgttgaattagcgccgggtgaaagcgtaccgatggttggtgtggtagaaaaaccgaaagcggatgttgcgccgtctaatctcgctattgtgggtcgttacgtacttagcgcggatatttggccgttgctggcaaaaacccctccgggagctggtgatgaaattcagctcaccgacgcaattgatatgctgatcgaaaaagaaacggtggaagcctatcatatgaaagggaagagccatgactgcggtaataaattaggttacatgcaggccttcgttgaatacggtattcgtcataacacccttggcacggaatttaaagcctggcttgaagaagagatgggcattaagaagtaacatccgtatcggtgttatccacgaaacggcgttgagcaatcgacgccgtttttttatagcttattcttattaaattgtcttaaaccggacaataaaaaatcccgccgctggcgggattttaagcaagtgcaatctacaaaagattattgcttgatcaggaaatcgtcgagggatttaccttgctcatccattgcttttttgattacagctggagtacggccttggccagtccaggttttagtttcgccgttttcgtcaacgtagctatattttgccggacgctgagcacgtttagctttggtgccagatttaacggcagcaaggctattcagcagttcgttcgggtcaataccgtcagcgatcagcatttcgcgatattgctgcagcttacgagtgcgctcttcaacttcagcagcagccgcgctttcttcttcgcgacgttcgttaacaacaacttctaatttttccagcatttcttccagcgtttcaagtgtacattctcttgcctgcgcacgaagagtacggatgttgttcagaattttaagtgcttcgctcattgtagtaatctcaaacttatattgggggtggtttgttgaggtaataatagagccttaaattcagttgtgcaatagccaggaatgtaaggaattcaaaattgttctttattttgtgccgccaataaatatcttttcataaaattagccagaaaagacgcggcatatagccctatttacaccgatgatttcgcagcacgtgaggttaaaacttcctgattcatgtcacattttatggggagattatcgtaggctgacgacctttcagtcttctgtattagttgtgtttacgagaattccctattaagcgaatgatgaaaagtagaacagtcgcaataagagcatggacttagtattgcactatctcctggaggtcaacagagggctattacttgcgcaacaggttaaagattgtgaatagttaccagcagtcatttacccgcttataacaagcgaggcagttgtaatgatagctcagaaggattatgcaaggcttcgtaagggagaacgcatatacccacttctgtgcatactgttgagctgaaaaactgacgaattatgataaactccagccaactttatttcatatcattgagggcctgtggctgatggcacagctatatttctactattccgcaatgaatgcgggtaagtctacagcattgttgcaatcttcatacaattaccaggaacgcggcatgcgcactgtcgtatatacggcagaaattgatgatcgctttggtgccgggaaagtcagttcgcgtataggtttgtcatcgcctgcaaaattatttaaccaaaattcatcattatttgatgagattcgtgcggaacatgaacagcaggcaattcattgcgtactggttgatgaatgccagtttttaaccagacaacaagtatatgaattatcggaggttgtcgatcaactcgatatacccgtactttgttatggtttacgtaccgattttcgaggtgaattatttattggcagccaatacttactggcatggtccgacaaactggttgaattaaaaaccatctgtttttgtggccgtaaagcaagcatggtgctgcgtcttgatcaagcaggcagaccttataacgaaggtgagcaggtggtaattggtggtaatgaacgatacgtttctgtatgccgtaaacactataaagaggcgttacaagtcggctcattaacggctattcaggaaaggcatcgccacgattaataagaatttctttactgacagggtgagcagggcacttttatcctgtcagttcgttttacgcacttcttccgggctatatacccttctcggcagttttttaacgccgctatacgcctcacagggctcttaagcaccgacgttgacttgtgacctgtaaagtacaatatccctgtgtttaggcgttatacatcgtcgcaaatatgatgaaggctaatgctgtcggtttatggaaaagttgctttgggtaaacaaaaaatacggccccagaagggcaatgccgttcacttaagaggagcggcactatgtttcacaggataacgggtttttgatatcttaaccgacctcggccttgatggtcgggggcgttttgttatgaacaccacttccagagcaccctgaagatgctccagtcgtttcgggatggtccctggtgacgccgtgtttcccagctctatcatttctgatgcgatattcttccacgcaggcagtagccagtggcggttacaacccttctggttcagcgtcagcagcaggtcttcgctgtaaaaaagtttatcaaacaacgtaatagagttatccgggatggtggcgagcatggagtgggccagcacagtttcgctctgccggtaaggtgcggtcacggcattcagcagaatatgacttcccaggttcattaaggccaccagacgcataaccgggtaggcgttctgccgcttagtggatgtgttggcagacccataatattcacgcagctcgggtttatcagtcaggtgtcctgaactgtgcgccatcaatggcaaaaagttgcaggccgtgccagtcatccttcaggtaacgttccgcgcccctgtctgtgcggtctggcggaagagccattccactggggcggcccccacgcgctgacgcgcctgggtgacagcgctgcgggccagcaggttcatccccgcttcgccatccgcgctcaggttcagacggcgaacaacatcggtaattggctcattgcaccaccatccagataaccatgtcccccggtaaacgacggcggcgaacggtcgcatgagcagaaagcgtcaggcagtgttgtatccactcggtgggaaggtgttctgcaaatagttgtgcagagggcggaggcataagcggatggtcactgaaatcgagcagatcattgagaagtggcataagaaaacggctccctgttgtggaagccgttatagtgcctcagtttaaggatcggtcaactaatccttaactgatcggcattgcccagaaggggccgtttatgttgccagacagcgctactgattaagcggattttttcgcttttttctcagctttagccggagcagcttctttcttcgctgcagtttcaccttctacataatcacgaccgtagtaggtatccagcagaatctgtttcagctcggagatcagcgggtaacgcgggttagcgccggtgcactggtcatcgaatgcatcttcagacagtttatccacgttcgccaggaagtctgcttcctgaacgccagcttcacggatagatttcggaatacccagttcagctttcagcgtttccagccatgccagcagtttctcgatcttagcagcagtacggtcgcccggtgcgctcagacccaggtggtcggcaatttcagcataacgacggcgagcctgcggacggtcatactggctgaatgcagtctgcttggtcgggttgtcgttcgcattgtagcgaataacgttacaaatcagcagggcgtttgccagaccgtgcggaatatggaactgggaacccagtttgtgcgccattgagtgacatacacccaggaaggcgttcgcaaacgcgatacccgcgatagtcgctgcactgtgaacacgttcacgcgctaccggatttttagacccttcgtggtaggacgctggcagatattctttcagcagtttcagtgcctgcagagcctgaccatcagagaactcagatgccagtacagaaacataagcttccatggcgtgagttactgcgtccagaccaccgaaagcacacagggacttcggcatgtccataaccaggttggcgtcgacaatcgccatatccggagtcagcgcatagtctgccagcggatatttctgaccagtagcgtcgtcagttacaaccgcaaacggagtgacttcagaacctgtaccagaagtggtggtgacagcgatcattttcgctttcacgcccattttcgggaacttgtagatacgtttacggatatccataaagcgcagcgccagctcttcgaagtgagtttccggatgttcgtacataacccacatgatcttcgcggcgtccatcggggaaccaccacccagcgcgataatcacgtctggtttgaaggagtttgccagttctgcacctttacgaacgatgctcagggtcgggtccgcttctacttcgaagaagacttcagtttcaacgcctgctgctttcagtacggaagtgatctgatcagcataaccattgttgaacaggaagcggtcagtcacgatgagcgcacgtttgtggccatcagtaatcacttcatccagcgcgattggcagggagccacggcggaagtagatagatttcggaagtttgtgccacaacatgttttcagctcgcttagcaacggttttcttgttgatcaggtgtttcggaccaacgttttcagagatggagttaccaccccaagaaccacaacccagagtcagggaaggtgcgagtttgaagttatacaggtcaccgataccaccctgagacgctggggtgttaatcaggatacgagccgttttcattttctgaccgaagtaagaaacgcgagccggttggttatcctggtcagtgtacaggcaagaggtatgaccgataccgcccatagcaaccagtttctctgctttttctaccgcgtcttcgaaatctttagcgcggtacattgccagagtcggggacagtttttcatgtgcgaacggttcgctttcatcaacaacggtcacttcaccgatcagaatcttggtgttttctggtacagagaagcctgccagttcagcaattttataggctggctgaccaacgatagccgcgttcagcgcaccgtttttcaggataacatcctgaacagctttcagctctttaccctgcaacagatagccgccgtgggttgcaaaacgttcacgtacagcgtcataaacagagtcaacaacaacaacagactgttcagaagcacagattacgccgttgtcgaaggttttggacatcagtacagatgcaactgcacgtttgatatcagcagtttcatcgataacaactggagtgttgcccgcgcctacaccgatagctggtttaccggagctgtatgcggctttaaccatgcccggaccaccagtcgcgaggatcaggttgatgtctgggtggtgcatcagtgcgttagacagttcaacagaaggttgatcgatccagccgatcagatctttcggagcaccggcagcgatagcagcctgcagaacgatatcagccgctttgttggtggcatcttttgcacgcgggtgcggggagaagataatggcgttacgggtcttcagactgatcagcgatttgaagatagcagttgaagtcgggttagtggtcggaacgataccgcaaataataccgattggttcagcgatagtgatggtaccaaaagtgtcgtcttcagacagaacaccacaggttttttcatctttataggcgttgtagatatattcagaagcaaagtggtttttgatcactttatcttcgacgatacccatgccggattcggcaacggccattttcgcgagtgggattcgagcatctgcagcagccagagcggcggcgcggaagattttgtctacttgctcttgagtgaaactggcatattcacgctgggcttttttacacgctctacgagtgcgttaagttcagcgacattagtaacagccataatgctctcctgataatgttaaacttttttagtaaatcatctgctcgaatacgagagtatagtcagtgcggtgatgatttgcttaacctatgaaaatcaaaagcttactcgcgctcacactcactgtgatttactaaaagagtttaaacattagagttattatctctaatgcgtcacttccaggtggcgtaagcaagattactcacttctgggtactgattacgtgatccaaatcaaatttttgcaaagctgacacctttcagcatcgcttttcgccattatagctaacagttaataaattgtagtatgatttggtggctacattagcatgttttgcacaactagataacaataacgaatgatagcaattttaagtagttaggaggtgaaaaatgctgtcaaaaggcgtattgtcagcgcgtcttttcaaccttatttatggctaacattatccggcttttgcttcggagctaaccgtgattcagaccttttttgattttcccgtttacttcaaatttttcatcgggttatttgcgctggtcaacccggtagggattattcccgtctttatcagcatgaccagttatcagacagcggcagcgcgaaacaaaactaaccttacagccaacctgtctgtggccattatcttgtggatctcgctttttctcggcgacacgattctgcaactttttggtatatcaattgattcgttccgtatcgccgggggcatcctggtggtgacgatagcgatgtcgatgatcagcggcaagcttggcgaggataaacagaacaagcaagaaaaatcagaaaccgcggtacgtgaaagcattggtgtggtgccattggcgttgccgttgatggcggggccaggggcgatcagttctaccatcgtctggggtacgcgttatcacagcattagctatctgtttggtttctttgtggctattgcattgttcgctttatgttgctggggattgttccgcatggcaccgtggctggtacgggttttacgccagaccggcatcaacgtgattacgcgtattatggggctattgctgatggcattggggattgaatttatcgttactggtattaaggggattttccccggcctgcttaattaattcctttcaaatgaaacggagctgccatgctccgtttacttcgtcattatttttactttgttcccgcgcagttatcaaaagcaaaaggaataggtaaaaatattcttctcaaattacagttagttataaggatttccttaactgcttctcctcaccatcatgttattttcgccacatcataatcctggacttgctgaagaataattgaaatgatattagtaattccactgcctttggtagaggaaagtgctaaataataatcaattgttaaattattgtgcatttcactactggaactgtaatcagaaaagatagacatgcttagctaatctctatttgattgaattgaaagatgtttgttaaggcatggatgcaagctatagattctgatacggtcaataaaagagaattgcttaacaattttgcaaaatgtattggcgagtaagaaccgcatttggtactttccgggcaaccgccagacgattatttattggtaatgagaataattaacaattaaagagcgtcgcgaaagaataatgtgtctcgacaggggagacacagtacgaatcgacataaggtgatcgtctgaatcaccagaataaataaagtcggtgatagtaatacgtaacgataaagtaacctgacagcagaaagtctccgagcctgtgcagggtcccaatccgggattacacatgctggttaataccagtaattataatgagggagtccaaaaaacaatgaccaacatcaccaagagaagtttagtagcagctggcgttctggctgcgctaatggcagggaatgtcgcgctggcagctgatgtacccgcaggcgtcacactggcggaaaaacaaacactggtacgtaacaatggttcagaagttcagtcattagatccgcacaaaattgaaggtgttccggagtctaatatcagccgagacctgtttgaaggcttactggtcagcgatcttgacggtcatccagcacctggcgtcgctgaaacctgggataataaagacgcgaaagtctggaccttccatttgcgtaaagatgcgaaatggtctgatggcacgccagtcacagcacaagactttgtgtatagctggcaacgttctgttgatccgaacactgcttctccgtatgccagttatctgcaatatgggcatatcgccggtattgatgaaattcttgaagggaaaaaaccgattaccgatctcggcgtgaaagctattgatgatcacacattagaagtcaccttaagtgaacccgttccgtacttctataaattacttgttcacccatcaacttcaccggtgccaaaagccgctatcgagaaattcggcgaaaaatggacccagcctggtaatatcgtcaccaacggtgcctataccttaaaagattgggtcgtaaacgaacgaaatcgttcttgaacgcagcccgacctactggaacaacgcgaaaaccgttattaaccaggtaacctatttgcctattgcttctgaagttaccgatgtcaaccgctaccgtagtggtgaaatcgacatgacttataacaacatgccgatcgaattgttccagaagctgaaaaaagagatcccggacgaagttcacgttgatccatacctgtgcacttactattacgaaattaacaaccagaaaccgccattcaacgatgtgcgtgtgcgtaccgcactgaaactaggtatggaccgcgatatcattgttaataaagtgaaagcgcagggcgacatgcccgcctatggttacactccaccgtatactgatggcgcaaaattgactcagccggaatggtttggctggagccaggaaaaacgtaacgaagaagcgaaaaaactgctggctgaagcgggttataccgcagacaaaccgttgaccatcaacctgttgtataacacctccgatctgcataaaaagctggcgattgctgcctcttcattgtggaagaaaaacattggtgtaaacgtcaaactggttaaccaggagtggaaaacgttcctcgacacccgtcaccagggtacttttgatgtggcccgtgcaggctggtgtgctgactacaacgaaccaacttccttcctgaacaccatgctttcgaacagctcgatgaataccgcgcattataagagcccggcctttgacagcattatggcggaaacgctgaaagtgactgacgaggcgcggcgcacagctctgtacactaaagcagaacaacagctggataaggattcggccattgttcctgtttattactacgtgaatgcgcgtctggtgaaaccgtgggttggtggctataccggcaaagatccgctggataatacctatacccggaatatgtacattgtgaagcactaatggcaatacgtggggcaggagtgtcctgctccacggtgtctgatttttatcgcattacagaaggcacaggccagaaggtagggcaatgttaaaatttattctacgtcgctgtctggaagcgattccgacgctatttattcttattactatttcgttctttatgatgcgcctcgcgccgggaagcccttttaccggcgaacgtactttaccgccagaagtgatggccaatatcgaagcgaaatatcatcttaatgatccgatcatgacacagtatttcagctacctgaaacaactggcgcacggtgatttcggtccatcgtttaaatataaagattattcggtcaatgacctggttgcatccagttttcccgtttctgccaaactgggagccgcagcatttttccttgcggtaatactgggtgttagtgctggcgttattgccgcattaaaacaaaacaccaaatgggactataccgtgatggggctggcaatgaccggggttgttatccccagttttgtggttgcgccattattagtcatgatatttgcgatcattttgcattggctgccgggcggtggctggaatggtggggctcttaaattcatgatattgccgatggtggcgttgtcactcgcttatatcgccagtattgcgcgtattacccgtggctctatgattgaagtattacactccaactttattcgtactgcccgggcgaaagggttacctatgcggcggatcattttacgccacgcattaaaacctgctctgttacccgtgctctcctatatgggccccgcatttgtcggcattattaccggttctatggtcatcgaaaccatttatggtttgccggggattgggcaactgttcgttaatggcgcattgaaccgtgactattccttagtgttaagcctgaccatcctggttggtgctttaaccattttgtttaatgccattgtcgatgtgctatatgcggttatcgacccgaaaatccgttactgatactggagctcgcgatgatgttaagtaagaaaaacagcgagacgctggaaaatttcagtgaaaagctggaggtcgaagggcgcagcttgtggcaggacgcacgtcgacgttttatgcataaccgtgcggcggttgccagtctgatagtgctggtgctgatcgcgttatttgtaatcctggcaccgatgctttcgcagtttgcctatgacgatactgactgggcgatgatgtccagcgccccggatatggagtccggtcactactttggtactgactcatccggtcgcgacctgcttgtgcgcgttgcgattggcgggcgtatctcactcatggtcggtgttgctgcggcactggtggcagtggtcgtggggacactttacggttcgctttccggttatctgggcggtaaagtggattcggtaatgatgcgtctgctggaaatcctcaactccttcccattcatgttcttcgtcattttgctggtgacctttttcggtcaaaacatcctgctgattttcgtggcgattggcatggtttcctggctggatatggctcgtattgtgcgtgggcaaaccctgagtctgaagcgcaaagagtttattgaggcggcacaagttggcggtgtatcgacatcgggcattgttattcgccacattgtgccgaatgtactcggtgtggtggtggtctacgcatcacttctggtgcccagcatgatcctctttgaatctttccttagcttcctggggttgggtacgcaagagccgttaagcagctggggtgcattgctgagtgatggcgcgaactcgatggaagtctctccatggttattgttgttcccagcgggattcctcgtggtgacgctgttttgtttcaactttatcggcgatggcttgcgtgatgccctcgacccgaaagatcgttaaggagtgcagccatgagcgtaattgaaactgcaactgtgccgctcgcacaacaacaggctgacgcactgctgaacgtgaaagatttgcgtgtcacctttagtaccccggacggcgacgtcacggcggtcaatgatttgaatttttccctacgtgccggagaaacgctgggtattgtaggtgagtctggttcgggtaaatcgcaaactgcatttgcgttgatgggcctgttggctgccaacggacgtattggcggatcggcaaccttcaatgggcgtgaaatcctcaatttgccagagcatgaactcaataaactgcgcgctgaacaaatctcaatgatttttcaggacccaatgacttcgttgaatccctatatgcgcgtcggtgagcagttaatggaagtgctgatgctgcataagaacatgagcaaagctgaggcgtttgaagagtcggtgcggatgctcgatgcggtaaaaatgccggaagcgcgtaaacgcatgaaaatgtacccgcacgaattttctggcggcatgcgtcagcgagtcatgattgcgatggcattgctatgtcgacctaagctactgattgcggatgaacccactactgcgctggacgtcaccgtacaggcgcagatcatgacgctattaaatgaactgaagcgggaatttaataccgccatcattatgatcacccacgatcttggcgtggtggcggggatctgtgacaaagtgctggtaatgtacgccgggcgcacgatggaatatggcaatgcgcgcgatgtcttttatcaacccgttcatccttattctatcggtttgctcaacgcggtgccgcgtcttgatgcggaaggtgaaacaatgttgaccatcccgggtaatccgccaaacttgctgcgattaccgaaaggttgcccgttccagccacgttgtccacatgcgatggaaatttgtagtagcgcaccgccgctggaagagtttacgcctggccgtctgcgtgcttgctttaaaccggtggaggaactgttatgaatgctgtaactgaaggaagaaaagtcctccttgaaatcgccgatcttaaagtgcactttgaaatcaaagatggcaaacagtggttctggcaaccgccgaaaacgctcaaagccgtcgatggtgtcactcttcgcctgtatgaaggggaaacattaggtgtggtaggggaatcgggatgcggtaagtccacctttgctcgcgccatcatcggtttggtcaaggcgaccgacggtcatgttgcctggttaggtaaagagttgctgggcatgaagcccgatgaatggcgtgccgttcgcagtgatattcagatgattttccaggatccgttggcatcgctaaacccgcgtatgaccatcggcgagatcatcgctgaaccactgcgtacttatcatccgaaaatgtcacgccaggaagttcgcgagcgcgtgaaggcgatgatgctgaaagtcgggttattgcctaacctgattaaccgctatccgcatgagttctccggtgggcagtgccagcgtatcgggattgctcgtgctcttattcttgaaccgaagctgattatctgcgatgagccggtttcggcgctggacgtgtcaattcaggcgcaggtggtcaacctgctccagcagctgcaacgtgagatgggattgtcattaatttttatcgctcatgacctggccgtggtaaaacacatttccgatcgtgtgttggtgatgtatctcggccatgcggtagaactggggacctatgatgaggtctaccacaatccactacatccttacaccagggcattgatgtcggcagtccccatacctgatccggatctggagaagaacaaaaccatccagttactggaaggggaattaccgtcgccgatcaacccgccttccggttgtgttttccgtacccgttgcccgattgccggtccggagtgcgccaaaacacgtcctgttctggaggggagtttcagacacgccgtttcttgcctgaaagtcgatccgctttaaacacaataagggctgacagttgtcagccctttttcacgccgaaagcgattatttattcccgccagatgatatggcaaagtttgtgatctttttcgcggcataacagaatgcgggcgaaaacatcgttgatttcaccatcttcactgtccgccagaccaatcaccacttcggcaaaaaagtctgggttcaaatcgaaatcaacatgttcctgccagtcttccgccggatcgaataactccgcgccgccgcgctcttcaaactgaagattgaacagcagaacatcagctggatcgagattgtcggcagccagttcgagaaaaatatcgtaggcctgctcaagcgtttcatcttcagtcaggcgattgtttagatccatatccatagtcactacctgtttaacctctgttggcgacgttttacagcaacggactgaagaagtaaaacagtcgctcggcgacacgttgccataatggacgttttagccataaacgggcatcgagcagacgtgaacgcgaaatataatcgtcctgaacggcggcaaggtctgcaccaaaacctttatcgtcgattgccagggtaatctcgaaattcagccacagactccgcatatcaaggttaacggtgccaaccagacttagttcgccatcgaccagcacgctcttggtatgcagtaacccgccttcaaactgataaattttaaccccagcagcaagcagttccgtaaagaatgcgcgactggcccagccgaccagcatcgagtcattttttcgcggaaggataatactgacatccaccccgcgctgcgccgccgtgcaaatcgcatgaagtaaatcatcgcttggcacaaagtagggcgtggtcatgatcaaatattcacgcgccgaataagccgcagtcaataatgcctggtgaatgagatcttccggaaagccggggccagaagcaattgtgtgaatggtgtgaccgctggcctgttcaaacggcataatattgacatctggtggtggcggcagaatacgttttccggtttcaatctcccagtcgcaggaataaataatccccatcgcggtggcgatggggccttccatacgcgccatcagatcaatccattgccctacgcccgcatcttgtttgaagtagcgaggatcgaccatattcatgctgccggtgtacgcgatgtaattatcgatcatgatcatcttgcgatgttggcgcaggtccatacggcgtaaaaacacacgcatcagattgacctttaaggcttcgaccacttcaataccggcattacgcattagctcgggccacgggctgcggaaaaaagccacactcccggcggagtcgagcatcaatcggcaatgaataccacgccgtgcagccgccattaatgattcagccacctggtccgccatgccgccgggctgccagatataaaacaccatctcaatattatggcgcgcgagctggatgtcgcggattaacgcctgcatcacatcatctgactcggtcatcagttgtagctgattccctttgaccccagcgatcccctgacgacgctcgcaaagcttgaataatggcgcagcgacactgctattttcttcggcgaagatatgcttacaggctttaaggtcgttaagccattttgcggtggaaggccacatcgctctggcgcgctcagcgcggcgtttgcctaaatggagctcgccaacggcaagataggcaataattccgactaacggcagaatgtaaataatcaacagccaggccatcgcggagggaactgcgcgtcgtttcattagaatgcgtaaagttacgcctgcaatgagcaaccagtatcccagaatggccaaccaactcaccaacgtataaacggttgtcatagattagaaatccttttgaaagcgcattgttatgagtttacgcatatggattcatctggcaaataaaaacgcgggaaaagcactggtcagcgtcgggggtgggggtataatgaccattctgttattgcatagagtagttaacatgaagcggagtagaacggaagtggggcgctggcgcatgcagcgtcaggctagccgacgtaaatcgcgttggcttgaggggcaatcgcgccgaaatatgcgtatccacagcatcaggaagtgcattctaaacaaacagcgtaactcgttattgtttgcgatctacaatatctaaatatactgggcaccattgcggtgcccaataagtttactctttcgtctttaaactctatttttgcgccgattctttactgtcagctttcgtttcttgttcatcgttatcgctgaaaataccatgacctgagttcaacaacattgaaacgagcatatcattattaatctcttcaccatttaaaactcgcgccagaatttcgctgccaaacagttgcggtgagagaatgatatccggatgtaccatcttaatcttattcaggtttttgctatcactgacggcgagaactgttttgacatcactgctcatatcttttgccgagagtacaacaaacgcgttatctgcatcgttatcactcagcgccagaatggcccggcaacgatcgattcccgctttctttaatactgaactgtcattactgtcaccggggataacatcagcgttatcgcctaagcgttgctcaagttgcttgatatcatcttcaggcaagttgctgataaccgttacgttttgtccgcgttgattcagttgcaggatcgtattgatggcgagaatcgaatgtccgcaaacaataaaatgatctttacgatgcattgtatgattgtttccttttacaagtttgttgaatcccccgcggataagcggaccaaaaattgaggtcatagatgtggcaaaaacggtaatgccggaaataatgaccgaaatagtgaacaatcgtgctgattcagaaacagggacaatatcgccatagccgacggttgacatggtttctatcgaaaaatagaacgcggtcatcaaactttctattcgcggattaaaaccttcgcttaaataaagcgcaccgtaggttgagtaaaacagtaatgtcgtgaaactaataaatgcaaaaattgtcccggctgcggcgctactgtgggagaagtctttgcgcagtatcagcaaaaacaccagcgtaaaaatgcaaaatccaatactaaatttcagccagggataaaaatgcagggtgtaaattagcgctatcaacaacaaaatgatactgattgcccatgcgagctttgcccggaacagtaagccaatggagttcaggacaagaaagacgccgagcataaatagtggggcgtttgccagcaaggagagatccaactctgaaaatgctttgatatggaaaatatcaagcaaattgaccgacataccatagattgttttaaaaataagcaatccatttaaaaagacggccagcgcgagaatgtcgtgccgaagggtcacccataaatttgttgctgtttgtttgaatgtagcccagtgactcactgatacctctgtaaccacaattttgtttaattatcttagcgtgcacattttctgaacatacatgcagcgcgtgaatgtgttaaacaatagtagatgactttatccgcagtaatcaaaggatttgagcgagcaactgtacctcaggaaaggtcatttttcctgaatatgctcacatcatataaagaaatacagataaagttattatctgcttgtggtagtgaatgcactgaccggctataaggaaaggccaaacaagaacacggttgcaaaaaccgtgcccttaaatattgaatctctattcagaacactttcttaaatggtttcactgaaacgtgttcatagactcctgccgctacgtacgggtcagcatcggcccaggcctgagctgcttccagcgattcaaattcagcaataacggttgagccagtaaatcccgcagcccctggatcgttactgtctaccgctggcattggaccagctgtcaacaaacgaccttcatcatgcagtaactgtaaacgtgctaaatgtgccggacgaacggaaaggcgtttttcgaggctatcagctttgtcttgagcgtaaataacatacaacacgggcacaactccttgttcgggaaagttgtaaagtacgttatttgaaagggcgaagatctgcaacggaaagatgatgtctttgttaagaccatgcataaattaaggtcaattacgccaaaaatgacattttcactgatcctgatcgtcttgccttattgaatatgattgctatttgcatttaaaatcgagatctggtttttctactgaaatgattatgacttcaatgacccttgatttacctcgccgcttcccctggccgacgttactttcggtctgcattcatggtgctgttgtggcgggtctgctctatacctcggtacatcaggttattgaactacctgcgcctgcgcagccaatttctgtcacgatggttgcgcctgctgatctcgaaccgccacaagccgttcagccgccaccggagccggtggtagagccagaaccggaacctgagccgatccccgaaccaccaaaagaagcaccggcggtcattgaaaagccgaagccgaaacctaagccaaaaccgaagccggtgaaaaaggtacaggagcagccaaaacgcgatgtcaaacccgtagagtcgcgtccggcatcaccgtttgaaaatacggcacccgcacgcctgacatcaagtacggcaacggctgcaaccagcaagccggttaccagtgtggcttcaggaccacgcgcattaagccgtaatcagccgcagtatccggcacgagcacaggcattgcgcattgaagggcaggttaaagttaaatttgacgtcacgccggatggtcgcgtggataacgtacaaatcctctcagccaagcctgcgaacatgtttgagcgtgaggtgaaaaatgcgatgcgcagatggcgttatgagccgggtaagccaggcagtgggattgtggtgaatatcctgtttaaaattaacggcaccaccgaaattcagtaagcagaaagtcaaaagcctccgaccggaggcttttgactattactcaacaggtaaggcgcgaggttttccttcaggatcaaccgcgacatacttaaataatgcttctgtcgctttatagcgttgcccgattggttcagacgctacttttttcacccacacttcaatattaatgctgaccgatgtcgtccctttctggacacagcgtgcatagcagcacaccacatcgccgaccgcaaccggccgtaagaaagtcattccttcaacccgcacagtcactacgcgaccgtgggcaatttctttcgccagaatagcgccgccaatatccatttgtgacattaaccaaccaccaaagatgtcaccattggcattggtatcggcgggcatggctaaagtacgtaaaacaagatcgccctgagggacgttatgtgttgtagacatggtaaaaccgacttaaaaggaaaatcacaggcgcgatgctactatgattttcctgaggagaacagaggagatacagcgccagccccgaaggactggcagtctggttaggatttatcttcctgcggcatgtggcggtagatatagataccgcttaacaatgtgaagattaaggtaagggcggtcaggccaaagactttaaagttgacccaaatattttgcggcagccagaatgcgatgtagatgtttgccagaccgcaaaggataaagaaaacagcccaagccagatttagcttcgaccataccggttgcggcagcgtgagttctttacccagcatccgctgaattagcggctttttcatcacccattggctgactaacagggctcccgcaaacagagcataaatgactgtaaccttccatttaataaactcatcattgtggaagaacagcgtcaagccaccgaagacgaccaccagaacaaaagtgatcagggccatcttctcaaccttacgaaagcgaacccagctatagataagcacaatcgccgtggcgacgatcagcgccgcagtagccgcatagatgtcataaatcttgtaaaacgcgaaaaagacaaccagcggtaaaaaatcaagaaactgcttcattttacgattccgtaatcaaatgcttaaggttattggcgaatcaacatatacaggcggaacagatagatgagcaatatggcagaaatcaggttgctcaaggtgttcgccagtacggcaccaatttccggggttaatgcggcaaaagaagaggcaaaaagcagcaacagtgtttttgccagcaaccagctcagtactgcgggtgccaccagacgcatattcgcccaagtcagccgcatactgctacgcatcgaggcaaaaatgcccattttgtcctgtaccagcatcaccggtgccagggccagtaaaatggccatgataattcccggaacgaccaccagcatgatgccaatctgtactaaaagggtagtcagaaaaatcagaataaataacttgggcaatatcggcgcactggcaccaatagctcgcagcgcactgactctctgacccgcagacaccagctggataattaatattacgcctccggcgagaatggcgttaccgattaatcctgaaaaagtggacgccgctgaagcctgcagcaaaatttgttgctgttccggtgacatattctgaaccaggtcgaacaacccactactgccgctaacgggcacgccgtcattgagctgcgcaagctgtgcatcactgggtgagaaaacatgccctaacaccactgtgataaacgcacatagcaacgataccaacagaatggtcataaattgattacggaagaaatttccggtgtcacggtatacggactgcgccgtgatagacatgcactctccttgagttttatgcaggtgttaattagcgggcaattgtaccctggttaagcctcgggtggcagcatcaggtcttgtatggaaaagcatatctttgtaaagcggaggtaattgctggccttcaggcgtgggcaaaccgcggcaagtggcgaacgagttaatatttgcgtagcgaaaatatttaaaaattgatttaaatcacgttaaccaggattctcaatgcaacttctaaattaatccagatcaataaatggtgaattatcatatgtaatgtgatctatgtaggatcatttgttactccaatgtaggtatattcgtcacgtttttataaccataacgacggagcggatatgaaaaagttaacagtggcggctttggcagtaacaactcttctctctggcagtgcctttgcgcatgaagcaggcgaattttttatgcgtgcaggttctgcaaccgtacgtccaacagaaggtgctggtggtacgttaggaagtctgggtggattcagcgtgaccaataacactcaactgggcctgacgtttacttatatggcgaccgacaacattggtgtggaattactggcagcgacgccgttccgccataaaatcggcacccgggcgaccggcgatattgcaaccgttcatcatctgccgccaacactgatggcgcagtggtattttggtgatgccagcagcaaattccgtccttacgttggggccggtattaactacaccaccttctttgataatggatttaacgatcatggcaaagaggcagggctttccgatctcagtctgaaagattcctggggagctgccgggcaggtgggggttgattatctgattaaccgtgactggttggttaacatgtcagtgtggtacatggatatcgataccacggctaagtacaaatctggtgttactaccgtaaaagactcggtacgactggatccgtgggtgtttatgttctccgcaggatatcgtttttaattttctctgcaaaacctctgcaaaacccctctgcaaaactggtcatcaaatgaccagttttttccattccttaccgcgtgcgtcgttgtaaatatcggtcattttttgattcgaatggcctagcaaaatattggtatcaaccccctgctctctgaacaatcgctctgataaagatctctgctcatggaaagagggaggggtgccattagcacgccagttgtaatccacagaatcccgggcttttttaaatgcaacggttaatgttgctggcttaaccatcccgccgcgcttagctgtccctttcgcgtgatggtggtgcaatagccacggactaagaacgcaatcgcggcaggatgacaccacatcatccagggtgagatttaatttatcgcaacgcagagccagagggatggcaatccgggttcctgttttttgctgttcgacatgaagataaccatcccggatatccgaaaattgcattttgcaaatatctgaaaggcgctggcctgtcatcagtgccagcagcataccgcgctgtaaaaagtaaccatccttttccgctgcgttataaatcatcatccactcatcaaaagtcagtcgctgtcttgatatccgcacctgcggttttttgccgattctgcagggttaaagcctggcgggacatcgcccgtttgctgagcttcccggaaaacatcgatcagtactttcctgaaaatttgtcccattctgttatgtcctctggccttgtactcttccagtactgataccacatcttttacggttatggcatctaaccgtctggtgccaaaacgttcatcaaataccctgagaggggccgctttctgtttcagcgtgttgagtttgatctcgccgttttcatatctttcctgttgaatttttctgtaattattcagaaaaatggtaacggttgatgaaccgccggtatcactaataattttctcctgcagactgagcatttgttccatttgctgccgggcaagacggctgttcgcttctgctgcaatagtttctgccagtttctggtcaatactgccgagaccgtgatttttgcctgttatgggatgcctgtaacgccagtaaactttgttatttcttttgtcaaaatacggagataatcccggaacatcggttttatattttcgcgggcgcgccatcttccagtatcctcttcaaagcagggtgatctgtggcgatcacctccggcttgtttaccattccgacaaagcgagcttgcggatccactcgccagcgtcttccaacttttttggggagaggaaatatcattccggctttagcgtatttacttaacgtactcggagtagggaccggttcactgaattcctcttttgcccactcagtgagcagaataagtcttgccatgggcgtcgttcgctaatcatggtcgccgccactatagctggtgggcaacgaccggggttgaacattaaaaatcagcctgactcgggatcagtttttgccagataactgaaacgtattttgcctggtaacgggcgtcatcaagtgcattatggcgctcacctcgaatggaatagccgttctgg

SEQ ID NO: 522 - DNA, 250 bp, Escherichia coli
agtgcattatggcgctcaccttcgaatggaatagccgttctggcatcgaagtctatggctttccccagctcaacgattgtgcgtacatcgcgatcgttgtagtaacgccacgggcaggggatcccctgccgttcgtatgaacggcgcaaaatcgtgttgtcgaagttggctccatttccccaaacctgaacaaaaattcaccggagttttcatcgataaattcccgcaattgtaacagtgcatcatctaa

SEQ ID NO: 523 - DNA, 82 bp, Escherichia coli
  modified_base (1)..(15): a, c, t, g, unknown or other
  modified_base (24)..(28): a, c, t, g, unknown or other
  modified_base (32)..(33): a, c, t, g, unknown or other
  modified_base (38)..(43): a, c, t, g, unknown or other
  modified_base (45)..(45): a, c, t, g, unknown or other
  modified_base (51)..(51): a, c, t, g, unknown or other
  modified_base (58)..(58): a, c, t, g, unknown or other
  modified_base (70)..(82): a, c, t, g, unknown or other
nnnnnnnnnnnnnnncacctattnnnnnaagnngggcnnnnnnantttttnccatggnttcaaggtcgannnnnnnnnnnnn

SEQ ID NO: 524 - DNA, 124 bp, Escherichia coli
  modified_base (1)..(2): a, c, t, g, unknown or other
nnaggytgttttgtttctggctcgttttgttgcgtattttgggctgttttgttccgctttctggtcgttctgttccgattcttgctggttctggtttacagaatcgcgggtttcaatccccttt

SEQ ID NO: 525 - DNA, 213 bp, Escherichia coli
ccctgcaacaaattctccgcgagaggcagcaagcaacttatcggcgtcaggctggctgatattggctgcctgcataattttgtttacttcgtcagcggtaacttttaccggctctggttgtgcggtcgtgtcagatgcaccagtattttgttgtgaacctgagtacgtgccgttttattcgtgcgtagagtcctaagtttattccgtttccgt

SEQ ID NO: 526 - DNA, 3113 bp, Escherichia coli
tcagatgcaccagtattttgttgtgaacctgagtacgtgccgttttttacgtgcgaagtattcctcttttgtgatttccgtagctcccaaggctagtgcttttccagaccagaaagtttgtttgcgcgaccgtatttttcgccatccttgtcggtgaagaggaagtagaacggcccctcacgctctacagatggttcgacttccactttgcattcggttttttcgttgcccggaattgccgtttccactgcatcagtttctggtactggcgacgagagagtatcagttgcgctctgatttcttccttcatcttcaaacacgccctttgtagtcaggtattcagtaatgtatttgttcagtgccacagggtctttgtgaatgtcgatcggacgttcacggacaaggccaaaaatagtctggcggtcgtagcgaagggcatcaggctgtttgcgcattgatgccgagatacgcttccagtcttcgcggtcgttgtcgataacttcattttttgcccagcgatggatgctgccgtcaatgtttccggcatccacatcaccaggccagagagcgtaggccagttcgtcatccagtgttttccatgtctgcttgtattcgcgatgaatggcagcaatgaccgggctgattttcctgttgaattttcactgtgctgttgattggttctggcgcgggcgagatcaacaacagacgtgtattttccggtttccttgcgttcaccttcgcgacgttttttccagatgcgcatctctgcctgaatttcgggccatttggcaccaggcttacatttatgcttaacccacccgatggcatgcagcttaagctccggatacatggcgttaacttctggcattttcatcaacgcttcaacgatatgtccgtcgaatgttgccatgtcttcctgcaacaattcctgtgcgctaataaccatatcaacggtgatgttttcacatgtgtcgaacttaaccatgacagcgttctgtacttcaggggccagcttgtcaaaagtgacgttcatcggatcggattcagtctcaaccgggacaaaggaagcagactcctcatcccagcggttttcctgcatatattcagcatcccaggaatcgagggcagggcggggtataccgggtttatcctcgcagacaagaaatttataagcgcagtcctgagcagccggataatgctccaggaattgccagtgaaattttgcgcgggcgcgacgttcatcaccggcttcaatggcagtggctacagcgacggcaccttcttcctttattgcctgttcgtccggaatggcggcgcaaataaagactttactcattttgttttacctcattacagatttaagggtgaacaaatccctgccattgctggcatataagaatgaaaccggatatttattacggaactgttttaaagacctgccgggatttcgttattatcctggtgaataactttatcgaccgggtaacagttaccgggaattttctgttcggttgctgcagtcacacactcctgcattgtcctgtgaacactgactgcaatatcaactggctctccggaaacaagaaaaactgtcagaacaagtgcaaatgctgtattcattgccagcatcctttttgtatcggacgtaaacgggccagcattgaaagaatgcatattttatttaatagctcccgttcgtgttttctcttgttaatggcatcttcagtaaatacagggttactgatagtgacaccaatttcaaaacaaccttcagacgtattaacgtttggtaataacgtttccattatcgcgtcctcaacaatgaattttgtgatgcggtgcctggtgcctccaggtgacgttaaccagttaacaattaacgccggatacagagaatccacccataacactgtttttggttttaactgttccgcgtgcgctcagccgcattcaccacatcacaaaattcactttaaaaagggcggcagagcagtcacggagtaaaactgataccgccaaacgtcaccagaaaattgataacagagggcgttgcagcggggttgtcacttaagcgtatggtcaacctgacaacccggtgtcctcaacgggggaaggaataaccccgccatacttaccgccgcgccatttcgcggattgccacaaccggaagcgcacggtcgacgaaaatttaacgacaggctatctatgaaccagctacctcgccgtgcgctttcgcgttatggtctgacttttcagggaaatatcctttcagtaaactgtcagtgccggattcttatccgtgtccggcgcacgaccacacgctgtcacgagaggtctccattctcaaccagtaacctcaatggaggataaaatgtcagagcaggagttaaaacttggtgcatgttattgtgttctcaaggagctggtacacatgcttccatctactcagtatcaacagttagttggcaatttaaatcagcgaatcgaagctatgttaaaatctgatggttttaataacgtagaaacgctgatgctaaaaagatatcttgatggattaatcagataacatttttttacggcgttcatattcgttaatatttatgaagcctgttgccagaagcagttcgttaatttcatggttgtttggctgtttctggctctttgagctgggatcttccacttctttttctgcaaattgttttgctgtatcctctgtgccatggatatttaaagctgtatctgaaaacagcccagtaaacgcatcgcgcacattacgagccatattatcagtgtctttttttgttaccgattccaattcaagttcgttcagacgatgacgaagtgtgtgtgctgcaatctcctggattgaaggaggtaaatctttaaattccatcgtcaacctcatcagtcagtgtttcttgctaaccagcgatgcgcgccagctgcggttttaaacgttttacttttggtatacgtcatcgcggtgaaggtgccgtcctggttagggaacacaccgcataccagagattcgttgttgccaatgatcgatagtatccatgctgacctcatttccccttaacgccggggtagcggaacaaaaacctgcwgcatag

SEQ ID NO: 527 - DNA, 645 bp, Escherichia coli
tgccgattagggggcgatgattgacccgatccgtcagtattaaaacctgatccgtcagataaaaagatcttcttgtccggacgcttcgcaaccggacccgcagacggctgaacaggattttttaacccgacaccctgacgcggttgtgttcagtgcgaaaaaacgccagtggggaagtcaggaagatttggtgtgcgcacagtggatctggggacgaatcgtgagtctttacgagcaggcggccagcgatgatggcgagatcactagaccgaaagaacccaactggacagcatgggccaatgacgttcgcacaatgcggatgctggatggcagaactcacagacaaatttgtgaaatgtttgggcgtctccagcgggattcgttctgggtaaaaaacatcatgagtccggcaaaactccgggaaaaatgggatgaactggttatccgcctggggcgttcgcctgcgcagcgttgcgtgaatcacatttctgaaccggacactgaaattccgccgggcttcagggggtaagtgttaatttctggtcatgaggtaattttmaggrggrcttgtggcaaaagtttttacacaagaagagcgggaaaaaattaaagggcaggtggtggaactcgtgcgccagagcggtc

SEQ ID NO: 528 - DNA, 21 bp, Escherichia coli
  modified_base (1)..(1): a, c, t, g, unknown or other
  modified_base (9)..(9): a, c, t, g, unknown or other
  modified_base (11)..(11): a, c, t, g, unknown or other
  modified_base (13)..(15): a, c, t, g, unknown or other
ncaactctngntnnnggttat

SEQ ID NO: 529 - DNA, 202 bp, Escherichia coli
aaggtgaagaaacctgcagtggttgatccggaccttatctggtcgttaccagacggcgaaatacgccgctacgacaggcgcctgaatataatctgtcgcgagtgccggaagagcgaagctatgcagcgtgtactggcattttatcaaggaaatgttcgatgaggcggtactgtgagtaaattagctatcaggcttcaattgt

SEQ ID NO: 530 - DNA, 576 bp, Escherichia coli
aatctcagggacgccctcttatcaaaattggccaactccactacggaaaagaagagaaggagtgattttatggatcacctttctgattgatttcatattggcgaggtgacgtgagttaagtagaatggcctgcgggtgcttgaggctatctgcctcgggcatcaacaccaaaggcagatagagaaaagccccagttaacattacgcgtcctgcaagacgcytaacattaatctgaggccatwtctatgctagacacagtgtaggttagcctcttacgcgccgaaaggcaaggagaagcaggctatgaagcagcaaaaggcgatgytartcgccctgatcgtcatctgtttaaccgtcatagtgacggcactggtaacgaggaaagacctctgcgaggtacgaatccgaaccggccagacggaggtcgctgtcttcacagcttacgaacctgaggagtaagagacccggcgrgggagaaatccctcgcccacctctgatgtgtcaggcatcctcaacgcacccgcacttaacccgsttcggcgggttttkgtwyttwctgtcawtctggtttrcaat

SEQ ID NO: 531 - DNA, 787 bp, Escherichia coli
  modified_base (9)..(9): a, c, t, g, unknown or other
  modified_base (25)..(30): a, c, t, g, unknown or other
  modified_base (34)..(34): a, c, t, g, unknown or other
caggcgcgnatgcgaggttaaaaannnnnntagnctcgaytaycgtcactggataatctccgtcaggcttccttactcygaacgcccaccgcgtccgtcccgcacattccagcaacgcatctggaggtaacgtgcgggtattacttcgacctgttctggtaccggaactcgggctggtgatcgttaagccgggccgtgaatccatgccggtattccacaatacccgggtactggtggagccggaaccgaaaagcatgcgtaatctgccgtccggggtcgttcctgccgttcgccagccgctggcggaggataaatcattactgccatttttcagcgacgaacgagtgattcgtgctgctggtggcgctggcgcattgtctgactggttactgcgccatgttaaatcctgccagtggccacacggcgattatcaccacagtgaaaccgtcattcaccgttatggtaccggcgcaatggtgttgtgctggcactgcgacaaccagctgcgcgaccagacctccgaatcactcgggcaacttgctcaccaaaacctgtttgcatggatgattgacgtcatacgccatgcaatgaatggctcgcaggaacgggaattatcgctggctgaattatcctggtgggcggtccgcaatcaggtggcggacgcgctaccggaagcggtattacgtcgttcgctggggttgcgtgcggaaaaaatccgctcaatgtaccgtgaaagcgacatcgtaccgggagagcagaccgccaccagcatactgaagcagcgcac

SEQ ID NO: 532 - DNA, 39 bp, Escherichia coli
  modified_base (1)..(3): a, c, t, g, unknown or other
  modified_base (6)..(6): a, c, t, g, unknown or other
  modified_base (8)..(8): a, c, t, g, unknown or other
  modified_base (13)..(13): a, c, t, g, unknown or other
  modified_base (19)..(19): a, c, t, g, unknown or other
  modified_base (21)..(21): a, c, t, g, unknown or other
  modified_base (26)..(29): a, c, t, g, unknown or other
  modified_base (34)..(36): a, c, t, g, unknown or other
  modified_base (38)..(38): a, c, t, g, unknown or other
nnngcncnaaaantcttgngncgctnnnncacgnnnanc

SEQ ID NO: 533 - DNA, 251 bp, Escherichia coli
atgcggatcctctggcgaaaaaaaaaaattcgagaaaagcatggttctcaggttgatttaatttttcgttttcttgatcacgcctttgcaactggcgtgcttgggtaaaagaggtgactgatgctcatagatttggttttaccttacccgccgacggtgaacacttactggcgacgccgtggcagcacatattttatctcggaggagggaaagcgttatcgccgggctgtggcgcttattgttcgccagca

SEQ ID NO: 534 - DNA, 232 bp, Escherichia coli
ggcgcttattgttcgccagcagcggctgaaattaagcctgtccggaaggctggcgataaaggtgattgcagagccaccggataagcgtcgtcgcgacctggacaatattctgaaagcaccactggatgcgctgacgcatgccggacttctcatagacgacgagcagtttgatgaaatcaatattgtgcgcggtcagcgcgttcctggggggcggctgggcgtgaagatttac

SEQ ID NO: 535 - DNA, 72 bp, Escherichia coli
  modified_base (1)..(2): a, c, t, g, unknown or other
  modified_base (8)..(8): a, c, t, g, unknown or other
  modified_base (24)..(27): a, c, t, g, unknown or other
  modified_base (32)..(32): a, c, t, g, unknown or other
  modified_base (37)..(39): a, c, t, g, unknown or other
  modified_base (41)..(42): a, c, t, g, unknown or other
nntctatnccgggaaacatccgtnnnnaaaancggcnnnanngctgcagcagataatcagcgcaagcagtcg

SEQ ID NO: 536 - DNA, 729 bp, Escherichia coli
  modified_base (3)..(3): a, c, t, g, unknown or other
aangcggcactggcgctcgggcgtcgtgcgattggcgttgaactggagaccggacgttttgagcagacggtcagggaagttcaggatttagtcagtcagaacggatgatattgcaggattagttacgtaccgttattatcctgcgcccggccctttagctcagtggtgagagcgagcgactcataatcgccaggtcgctggttcaaatccagcaagggccaccatcacataccgccattagctcatcaggaaagagcgccagccttcgaagctggttgcgcggagttcgggtccccgaaggcggttcattatctgtatcctgcgttgttagctcagccggacagagcaattgccttctaagcaatcggtcactggttcgaatccagtacagcgcgccacacttattttccctggctcgcttttgygggcttttttttaaatgtctcacaattcaggcggttgactgttgtctggtttgcggggagtttgttaaaagaaactggcatggtgaatccccctgtgcggaggggcaatcagcgagtaggtatatgggataatcgcggattcaggtgctggtactgaattcaccgggaggcacccggcaccatgcaatggcacatagcgccactctccagcccctctccggaggggctgtttatattgattttgtcagatgtgagtaaactccttatggactttgttgttttagcccataaggacatatttgca

SEQ ID NO: 537 - DNA, 315 bp, Escherichia coli
tttaataatgactgaggcataacctgattcgtggtatgtgggtaacaagtgtaatctgtgtcacaattcagtcagttgacagttgcctgtcagactgagcatttgttaaaaaaatttcgcatggtgaatccccctgagcggaggggcgactggtgacggtataatctctgattatcaaaacgagaatgacgcgggtttagtggcaccgggctgaactcaccgggaggcacccggcaccatgcaatggcacakagmttaggcatataccaaggcctctcatagcaggggcctttttacatgtaaaaaagcccgagt

SEQ ID NO: 538 - DNA, 1857 bp, Escherichia coli
  modified_base (1852)..(1857): a, c, t, g, unknown or other
gccactctccagcccctctccggaggggckttycttatggacaaaaaagcccgcgctgggagacgcgggcggcaaggaataaacaataaaacgtgaagtaatatttcagctggcgaataatayccsayagtaatcactctgcgcaatagcgcggcctttttcgtattgcgggctgttgtctatcttctgccattgtcctgtaacttccggacttcagcccgctcctcattttactcacaatattatccaggccgggaggattcatggcatttaaacactatgacgtggtcagggcggcgtcgccgtcagaccttgcggagcgactgacacaaaaactgaaggaggggtggcagccgtttggtagtccggtggccataaccccttataccctgatgcaggcgattgcagcagaaggtgatgtggtcgtcagtggtgcaactgagccggagtggtactacgtcatcgtactggccgggcagtccaatgccatggcttacggtgaagggcttccgcttccggattcatacgatgcgccccatccgcgcattaagcaactggcccgtcgtaacacagtgactcccggtggtgaagtatgcgtatttaacgacatcattcctgctgaccattgtctgcatgatgttcaggatatgagtacgattaaccatccccgggctgacctgagcaaagggcagtacggctgtgtcggccagggcttacatattgccaaaaaactgcttccgtatatccctaataatgcggggatcctgctggtaccatgctgtcgtggtggttcggcattcacccagggcacggagggracattcagcgagtccacgggggccagtcaggattcggctcgctggggagtgggtaagccgttatatcaggatctgcttttccgcacgaaggcagcattgcagaaaaacccgaaaaacgttttgctggcgatatgctggatgcagggggaattcgatatgacgaatgccagttacgcccagcagccagcagcatttcttgcaatggtacagcagttccgtgctgaccttgccgggctggcagcgcagtgtcacggtggaagtccggcatcagtcccctggatttgtggcgacacgacatacgcgtggaaacaagaacacggtacgcaatatgaagtggtatatggtgcatataaaggtaaagaatcccagcagatttattttgttccctttatgaccgatggtagcggagttaatacaccgacaaacaacccgtcagaagatcctgatattgccgggtctggttattacggttcggcatcccgaacgaacaaaaactgggtatcatcaaatcgcccgacgcatttcagctcatgggcgcgtcgtggcattattcccgatcgtatggcaactgctattctgaacgtagccgggcgcacctcagccttcatcagcggtaccgcaccggaaatcaaaccctcgcccggcggcgacacgccatcggggccgtctgatggtgacacatccgttcgtacagtctccctgctgccgacagccggagaggctgctgcgcagggctggaccatcaccggcggcagtgttgcgctggaagatggtgtgtttaaggttaccaagcagagcaataaaacttggtccctgatgcatccggtggatgacgcagtctccctgctgacacggggtggcagactgagctgtaagtttcgactgtcaggcgcactgaccaacaatcagttcggtctgggaatttatctgtataccgatgtagcgttacctgacgtcgtggcgatgaccgggactggtaacccgttcctgatgtcgttcttcacccagaccacagacggcaaactgaatctgannnnnn

SEQ ID NO: 539 - DNA, 718 bp, Escherichia coli
  modified_base (299)..(299): a, c, t, g, unknown or other
tcacaagaaagccggaaasacaaagttgggcgagttcgggaattacagtaacgactggcagacgctggagctggtgttcaccgccggcagtgccacggttactccgaaactgaatggagtggctggcccggcattccaggtcataaaagacagtctgacactggggctgaatgcgctgacgctgacggatattaccaaaaatgcagcgtatggcgttgagatagaaagtctggtgctggagataaatgcaccggcatcatcataaaaagtgagccagtcaaatggaaggtatcgttaanctcaccggtagtgtcagtgggtcgtctgagatgcctgcatgagttatcagagccatcagtacttaactggtggctttttttattgttgtcagcttccggataacgggagacggggtatgtaccagatggaaaaaatcacaacaggtgtgtcatacaccacgtcagcggtgggaacgggctactggttcctgcagttgctggacagggtttccccgtctcagtgggcggcaataggcgtgctggggagtctgctgtttgggctgctgacgtatctgackaacctgtatttcaaaatcagagaggacaggcgtaaggcggcacggggagagtaagctgatgagcaggaaactccgctatggtttatcggctgccgttctggcgctgattgccgcaggtgcttctgcgcctgaaatcctcga

SEQ ID NO: 540 - DNA, 101 bp, Escherichia coli
  modified_base (5)..(8): a, c, t, g, unknown or other
  modified_base (13)..(16): a, c, t, g, unknown or other
  modified_base (18)..(18): a, c, t, g, unknown or other
  modified_base (36)..(36): a, c, t, g, unknown or other
  modified_base (76)..(76): a, c, t, g, unknown or other
  modified_base (90)..(90): a, c, t, g, unknown or other
  modified_base (97)..(101): a, c, t, g, unknown or other
atgannnnaaaannnnantacggcctgtcagctgcngttctggcgctgattgctgcaggcgcgtctgctcctcaantacttgaccagttnctggatnnnnn

SEQ ID NO: 541 - DNA, 210 bp, Escherichia coli
  modified_base (1)..(14): a, c, t, g, unknown or other
nnnnnnnnnnnnnntggtgccacaatggtggatggtaagcctgtcgtaccgggcatgaagttgtcgaaggaaaaatgcgaccaggttaacgccattgaacgtgataaggcgctggcatgggtggcgaaaaacatcagagtgccactgaccgaacctcagaaagcggggatcgcgtcattctgtccttacaacattggccccggtaagtgt

SEQ ID NO: 542 - DNA, 38 bp, Escherichia coli
  modified_base (1)..(2): a, c, t, g, unknown or other
  modified_base (8)..(12): a, c, t, g, unknown or other
  modified_base (16)..(17): a, c, t, g, unknown or other
  modified_base (22)..(22): a, c, t, g, unknown or other
  modified_base (35)..(35): a, c, t, g, unknown or other
nnacattnnnnncggnnagtgnttcccgtcgacgnttt

SEQ ID NO: 543 - DNA, 78 bp, Escherichia coli
  modified_base (1)..(3): a, c, t, g, unknown or other
  modified_base (5)..(5): a, c, t, g, unknown or other
  modified_base (23)..(23): a, c, t, g, unknown or other
  modified_base (39)..(39): a, c, t, g, unknown or other
  modified_base (48)..(49): a, c, t, g, unknown or other
  modified_base (52)..(56): a, c, t, g, unknown or other
  modified_base (59)..(61): a, c, t, g, unknown or other
  modified_base (72)..(78): a, c, t, g, unknown or other
nnncngggcggcgacctcgcggnttttcgctatttatgnaaatttttnnggnnnnntcnnntccgttcttcnnnnnnn

SEQ ID NO: 544 - DNA, 184 bp, Escherichia coli
aggaaaaggsaytgaatctgtatttgatacwgctgcatggcaattcagtggtatgcgcagagggaaactgatatcgaaaacgaaaagctccgcaaagaactggacgatttgcgtgcggcagcggagtcagatttacaacccggcaccattgactatgaacgctaccggctcacaaagcgcaggc

SEQ ID NO: 545 - DNA, 288 bp, Escherichia coli
tgctggaaactgaactgtttaccttcattctgcaacgtgtggcacaggagatttcggggatacttgtgcgtgtgccgttgacattacagcgtaaatatccggacatttcacccatcacaccttgatgtggtgaaaactgaaatcgcgaaagcctccaatgttgcagctaaggccggtgaaaacgtgggcgggtggatcgatgatttcagacgcgcagaaggcagctaatgcagccggtgcgatagctacagggctttatctctcattattcctgttccactgacgaca

SEQ ID NO: 546 - DNA, 6102 bp, Escherichia coli
  modified_base (6099)..(6099): a, c, t, g, unknown or other
  modified_base (6102)..(6102): a, c, t, g, unknown or other
gaaggcagctaatgcagccggtgcgatagcaacagggctttttatctctcattattcctgttccactgacgacagttcagtgggccaataaacattattaccttcctaaagagtcgtcttatacccccgggcggtgggaaacactgccgtttcaggttggcatcatgaactgtatgggcaacgatctgattcgcacggttaacctgattaaatctgcccgtgttggttatacaaagatgttgctgggagtggaggcttattttattgagcataaatcacgcaacagccttcttttccagcccacggattctgctgctgaagattttatgaaatctcatgtggaacccacgatcagggatgtgccggttttactcgatcttgcaccgtggtttgggcgtaaacatcgtgataataccctcacgctgaaacgtttttcatcgggcgtgggcttctggtgcctgggcggggctgccgctaaaaactaccgtgaaaaatccgtggacgtggtctgctatgacgaactttcctcgttcgaaccggatgtcgaaaaagagggttcgccaaccctgctgggggataaacgtattgagggctctgtatggccaaaatccattcgcggctcgacgcctaaaatcaaaggctcctgccagatcgaaaaagccgctaacgagtcggcacacttcatgcgtttttatgtgccctgtccgcactgtggggaggagcagtatctgaaatttggcgatgatgcctcgcctttcggtcttaagtgggagaagaataaaccagaaagcgttttctacctctgtgaacatcatggctgcgtgatccatcagtctgagcttgaccagagcaacgggcggtggatctgtgaaaacacggggatgtggacccgtgacggtctgacgtttttcagcgccgcggataatgaaattccgccgccgcgctccatcacgttccatatctggacggcgtacagtccgttcaccacctgggtacagatagtctatgactggctggatgcactgaaagatcccaacggcctgaaaacctttgtgaacaccacgctgggcgagacctgggaagaggccgtgggcgaaaaactcgatcaccaggtactgatggataaggtcgtgcattacacggcggcggtgccagcccgggtggtttatctgacggcgggcattgactcgcagcgaaaccgttttgagatgtatgtctggggatgggcaccgggagaggaagcttttctggtggataaaatcatcattatgggccgtcccgatgaggaagagacgctgttacgtttggatgcggcgatcaacaaaaaataccgccatgcagacggaaccgaaatgactatttcccgtgtctgctgggacatcggggggatcgatggcgaaatcgtttatcagaggtcaaaaaaacacggtgttttccgggtgctgccggtaaaaggcgcatctgtctatggcaagccggtgatcaccatgccgaaaacccgcaatcagcggggcgtgtatctgtgtgaagtggggacggacaccgcaaaagaaattctctatgcccgtatgaaagccgatcccacgcctgcggatgaagccacgtcgtatgccatccgttttcctgatgatccggagattttttcgcagacagaggcgcagcaactggtggcggaagagcttgtggagaagtgggaaaaaggaaagatgcgtctgctgtgggataacaaaaagcggcgtaacgaagcgctggactgcctggtgtatgcctatgcggcattacgtgtgtccgtgcaacgctggcagcttgatctggctgtactggcaaaatcccgggaagaagagacgacccggccaacccttaaagaactggcagcgaagctgtccggaggagtgaatggttacagtcgctgaactacaggcgctgcgtcaggcgcgccttgatttattaaccggtaaacgggtggtgtctgtccagaaagatggtcgcagaattgaatatacggcggcttctctggatgagcttaaccgggcgatcaatgatgcggagtcggtactggggacaacccggcgtcgccgtcgtccgctgggagtgaggttatgaaacgaacgcctgtcctgattgatgtgaacggcgttccgcttcgtgatagtctcagctacaacgggggcggtgcaggatttggcgggcaaatggctgagtggttgccaccggcgcagagtgccgatgcggccctgctgcccgcgttgcgtctggggaatgcccgggcagatgatctggtgcgcaataacggaatagcggccaatgcggtggccctgcataaggatcacattgtcgggcatatgtttctgattagctaccgtccgaactggcgctggctggggatgcgggagaccgcggcaaaaagttttgtcgatgaggtggaggcggcctggtcagaatacgcagaagggatgtttggcgagatcgacgtagaagggaaacgcacgtttacggaatttatccgtgaaggtgtgggcgttcatgcgtttaacggcgaaatctttgtgcagccggtctgggatacggagagcacgcaactgtttcgtacgcgttttaaagccgtgagtccgaaacgggtggacacgccaggacacggtatggggaaccgttttctgcgggccggtgtggaggtcgatcgatatggtcgtgccgttgcgtaccatatctgtgaggatgattttcctcgctccgggagtggacgatgggaacggatcccgcgtgaacttcccaccgggcgtccggccatgctgcatattttcgagccggtggaggacgggcagacccgtggagccaatcagttttacagcgttatggaacggctgaagatgctggattccctgcaggcaacacagcttcagtcggccatagtgaaggcgatgtatgcagcgacgattgaaagtgaccttgataccgaaaaggcctttgaatatatcgccggtgcgccgcaggggcagaaggataatccgcttattaatattctggataagttctccacctggtatgacacgaatagcgtgacgctgggcggtgtcaaaattccgcaccttttccccggtgatgatctgaaacttcagaccgcgcaggattcagacaatggattttcggcgcttgaacaggcgctgctgcggtatatcgccgccggtcttggcgtttcctacgaacagttgtcccgtgattactcgaaggtcagttattcaagtgcccgcgcctccgccaatgagtcgtggcgctattttatggggcggcgaaaatttattgcgtcccggctggccacgcagatgttttcctgctggctggaagaggcacttcttcgggggattattcgtccgccacgggcacgttttgatttttatcaggcgcgttcagcctggtcacgggctgagtggattggtgccggaagaatggccattgacgggctcaaggaggttcaggaatcagtgatgcgcattgaggccggactgagcacgtatgagaaagagctggcgctgatgggcgaggattatcaggacattttccgccagcaggtcagggaatctgcagagcgggaaaaagccggactctcacgtccggtgtggatagcgcaggcgtatcagcagcagatagcggagagtcgcaggccggaagaggagacaacaccacgtgagacgtaatctttcacacattattgccgcagcattcaatgaaccgctgcttctggagcccgcctatgcgcgggttttcttttgcgcgctcgggcgcgagatgggggcagcaagtctttcggtaccacaacagcaggtacagcttgatgcacccggaatgctggctgaaacggacgagtacatggccggaggtaaacgaccggcccgtgtttaccgggtggtgaacggtattgctgtactgccggtgacaggcacgctggtgcaccggctggggggtatgcggccattttccggaatgacaggctatgacggcattgtcgcctgtcttcagcaggcaatggcagatagccaggtgcggggcgtactgctggacattgacagtccgggcgggcaggccgccggtgcgtttgactgtgctgacatgatttaccgcctccgtcagcagaagccggtctgggcactgtgcaatgacacggcctgttctgcagccatgctgctggcgtcggcctgctcccgacggctggttacccagacatcccgtatcggctccattggtgtgatgatgagccatgtcagctatgccggtcatctggcgcaggccggtgtggatatcacgctgatttactcaggggcgcacaaggtggatggcaatcagtttgaagcgttgccggaagaggttcgccaggacatgcagcagcggattgatgcggcgcgccggatgtttgccgaaaaagtggcgatgtataccggtctgtctgttgatgcagtcacgggaacagaggccgccgtttttgaaggtcagtccggcattgaggccgggctggcggatgaattaatcaatgcgtcggatgccatcagcgtgatggctgcggcgctgaacacacatgatacaggaggcactatgccgcaattaactgcaacggaagctgccgcgcaggagaaccagcgagtgatggggatcctgacgtgtcaggaagcgaaaggacgtgaacaccttgccacgatgctggcaggacaacagggcatgagcgttgaacaggcccgggcgattctgaccgcggcagcaccacagcagccggtggcatccacgcagagtgaagccgatcgcattatggcgtgtgaagaggctaaaggtcgtgaacaactggcggcaacgctggcggcgatgccggagatgacggtggaaaaagcccgcccgatcttggctgcctcaccgcaggcggatgccgggccctcacttcgtgatcagatcatggccctggatgaggcaaaaggggcagaagcgcaggctgaaaaactggcggcctgcccgggaatgaccgtggagaacgcccgggctgtgctggctgcgggatcaggtaaggccgaaccggtctctgcatccacaacygccctgtttgaacatttcatggcgaatcattcaccggcagcggtgcggggtggcgtgtcacagacgtcagcagacggtgatgcggacgtgaaaatgctcatggccatgccatgaagtcagtgctgaccatcaatatgaggttttaacaaaatggtgacgaaaaccatcactgaacagcgtgcggaagtacgtatttttgctggtaatgatccggctcataccgccacaggcagcagcgggatttcttctgcaacaccggctctgacgcccctgatgctggatgaagccagcgggaaactggtggtctgggacggacagaaagccggtagtgcggctggcatactggtactgccgcttgaaggcacagagacggtgctgacgtattacaagtcggggacctttgcgacggaggcaatccgctggcctgaaagtgtggatgaacacaaaaaggccaacgcctttgtcggcacagccctgagtcacgcggctctgccgtaacacgttatcaggccaccatggtggcctgactgatttctgaatgaaaggaactgatttatgggattgtttacgacccgccagttactcggttataccgaacaaaaagttaaattccgtgcgctatttctggagctgtttttccgccgtacggtgaatttccacaccgaagaggtgatgctggacaaaattaccggaaaaacgccggtggcggcctatgtctccccgatcgttgaaggaaaagtgctgcgccatcgtggtggtgaaacccgcgtgttgcgtccgggctacgtcaagccgaaacacgaatttaattaccagcaggcggtkgagcgccttcccggtgaagatccggctcagctgaacgacccggcctaccgtcgtctgcgtatcatcactgataacctcaaacaggaagagcacgccattgtccaggtggaagaaatgcaggcggtgaatgccgtgctgtatggcaaatacaccatggaaggagaccagttcgagaaaattgaggttgatttytggcrctcngan

SEQ ID NO: 547 - DNA, 787 bp, Escherichia coli
garggagaccagttcgagaaattgaggttgatttggcagatcgacgaagaataacatcatacagggtagcggtaaggagtggtcaaaacaggaccgtgacacgttcgacccgacatatgatatcgaccttttctgtgatcaggccagtggtcttgtgaatattgccattatggacggtaccgtctggcgtctgctgaatggctttaagcttttccgcgaaaaamtggatacccgtcgcggttcaaattcacaactcgaaacggcagtgaaagacctggggtcggtggtgtccttcaaggggtattacggtgatctggctattgtggtggcgaaaacatcttatgtggcagaggacggtaccgaaaaacgttatctgccggagggcacgctggtgctggggaatacggcagcagaggggattcgttgctatggagccattaaggatgcrcaggcgttgtcygaaggkgtggtggcctcttcccgttatccgaaacactggatgaccgtgggcgatccggcccgtgaattcaccatgacgcagtccgctccgctgatggtgctgccggatccggatgagtttgtggtggtacaggtgaaataatccgtgagcgggggcgaaatgcccccgtgtcttttttcacagggggctggatatggcaacaaaagaagaaaatcagaaacgtcttcgtgaactggctggcctgctggggcgcgaggcggatatgtcggggagtgcagcggatatcgcacagcgtgtggcagagtgggaagaggaggtttgcgcatc

SEQ ID NO: 548 - DNA, 3385 bp, Escherichia coli
  modified_base (4)..(4): a, c, t, g, unknown or other
aacngccatgatcaagagtggaatggccgtttatgcgtgattttcagaatgccttcgatgctgccctcgccggggtggacagcacgattgttgaagtgatgggactctgtgcgcagttcacctcgggggcacagcgtggtggcgaagttcagggggtttttgacgatccggagtcgctgggttttgccggtggcggggtccgtattgaaggaagcagcccgtcattatttgtgcggacggatacggttcgggctgtgcggcgtggtgacacgctgaccattaacggcgagatgttctgggtggatcgtgtttctccggatgacgggggaagctgttatctctggctcaaccgtgggcaaccacccgctgttaaccggcgacgataaacgcagggtgaaattatggcgataaaagggcttgatcaggcgattgataatctgagccgggttcgtaaaaacgccattccggcggcttcagcaatgacgattaaccgcgtggccacaacggcgattaatcagtcttcatcacaggttgcccgggagacaaaggttcgccggaaactggttaaggaacggtccagactgaaacgggcgacggtcagaaatccgaatgccagaattatcgttaaccgcggtgatctccctgtgattaagctggggatcagaatgctggggcgtcgtccgaacagcatactcaaagccggtcagcatcgttatcagcgggcatttatccagcgattaaataatgggcgctggcatgttatgcaacgtcttccccaggccagatatgaggagggcaatgacgacaagggaaggaaaaagcgtaatcgccttcccattcaggtggtgaaaatcccgatggcggccccactgaaacaggcatttgatgagaatgttgaccgtatccggcgtgaacgcctgcccggagaactggcatccgcgctgaaacaacaactgaggattgcgataaaacgatgaaacacactgatatccgtgctgcagtgctggatgcactcgagcagcatgaacacggggcgacgctgtttgatggtcgccccgttgtttttgacgaagaggattttcctgcgatcgcggtttatctgacggatgcagagtataccggtgaagagctggatgcagatacctggcgggccacactgcatattgaggtgtttttaccggcacaggtaccggattcagagcttgatcagtggatggaaagccggatttatccggcgatgactgcgatcccggcactggcaggactgattaccacgatggttacgcagggctatgagtatcgtcgtgatgacgatatggcgttatggagctctgcggatctgacttattccattacatacgagatgtgaggacgatatggcaacaccaaatcccctggagccagtaaaaggtgccggtaccactctgtgggtttacaacggcaagggtgatgcttatgcaaacccgttgtcagacgctgactggcagcgactggctaaggtgaaggatctgacgccgggcgagatgacggcagaatcctacgatgataactacctggatgatgaagacgcagactggaccgcgaccgggcaggggcagaaatctgcaggtgataccagttttacgctggcctggaaaccgggagaggaatgtcagaaagggcttataggctggtttgaaagcggcgatgtccgggcctataaaatccgttttccgaattggcacggtggatgtgtttcgtggctgggtcagcagtatcggtaaggccgtgacggcgaaagaagtgatcacccgcacggtgaaagtcactaacgtgggtaaacccttctgtagcggaagaacgcagcaaaattacgccggtcagtgcgattaaggtgacgccgacatccggtacggtggcaaaagggaaaacaaccaccctgacggtttcttttgagccggaaagtgcaaccgacaagacgttcagagcggtttccgccgatccgtcgaaagccaccattagtgtgaaagatatgacaattacggtaaacggcgtggcgacaggtaaggtgcagatccctgtggtgagcggaaatggtcagttcgccgcagtggctgaagtcaccgttactgaagcgggcgctgcagggtaaacggaggtaatacatgtttctgaaaacagaacaatttgaatataacggtgtgtctgtcacgctttccgaattgtctgcgctgcagcgtatcgagcatcttgccctcctgaaacggcgtgcagaacaggcagaatcctgcggcaacctgcaggttagcgtggaagatctcgtcagaaccggcgcgtttctggtggcgatgtccctgtggcataaccatccgcagaaaacgsrgtcaccgtcaatgaatgaggccgtgatgaagatagagcaggaagtgctcaccacctggcctgccgatgccattgcccgggcggaagacgtggtgttgtgcctgtccgggatgatcgaagctgttcgtccggatactgatattactgaagtggcgaaaaataacacgctgactgatgatgatttttctgcgggaaagtcttcgacggcgagctgaactttgccctcagactggcgcgtgagatggggagacccgactggcgcgccatgcttgccgggatgacatccaccgaatatgccgactggcaccgtttttaccgcacgcattattttcaggatacccagctggatatgcatttttccgggctgacgtacgctgtactcagcctgttttttgcgatccggatatgcatccctctgatttcagtctgcttgtcccccggcatgaggaagagcaggtggagaggccggatgaggacaaaatgctgatgcagaaagcggcaggacttgccggaggcgtccggttcggtggggacggagggcgcgatattttatcgtctgcggatgtggcggatgtcatggtggatgatgccgcattaatgatggcttcagcggggattccgggaggtgtgagatatgtcccagccggttggtgatcttgttattgacctgagtctggatgctgtccgtttcgatgagcagatgagccgggtaaggcgtcatttttcaggtctggataccgacgccagaaaaaccgccagtgctgttgaacagggcctgagccgccaggcgctggctgcacaaaaagccgggatttccgtcgggcagtataaagcggccatgcgaaccctgcccgcacagtttacggatatcgccacgcagcttgccggtggtcagaatccctggytgatcctgctgcaacagggcggtcaggtgaaggactccttcggcgggatgatccccatgttcaggggcttgccggtgcgatcaccctgccgatggtcggggtcacctcgctggcggtgg

SEQ ID NO: 549 - DNA, 772 bp, Escherichia coli
  modified_base (456)..(459): a, c, t, g, unknown or other
  modified_base (461)..(461): a, c, t, g, unknown or other
  modified_base (463)..(463): a, c, t, g, unknown or other
  modified_base (475)..(475): a, c, t, g, unknown or other
  modified_base (477)..(477): a, c, t, g, unknown or other
  modified_base (486)..(486): a, c, t, g, unknown or other
ccccatgttcaggggcttgccggtgcgatcaccctgccgatggtcggggtcacctcgctggcggtggcgacaggtgcgctggygtacgcctggtaccagggcgaykccacgctttcagaatttaataaaacgctggtcctttccggcaatcaggccggactgactgccgatcgtatgctgacgctctcaagagccgggcaggcagcagggctgacgtttaaccaggcgagagagtcactggcagccctggtgaatgccggtgtgcgtggtggtgaacagtttgatgccatcaaccagagtgtcgcgcgttttgcgtctgcatccggtgtggaggtggataaagtcgctgaagccttcgggaagctgaccactgacccgacgtcgggactgatggcgatggcgcgccagttccgtaacgtgacggcagagcagattgcgtatgttgcacagctgcannnntncngagacgaggccngngcattgcangcggcgaacgatatcgccacgaaaggctttgatgagcagacccgtcgcctgaaagaaaacatgggaacactggagacctgggcggataaaacagggaaggcattcaaatcgatgtgggatgccattctggatatcggtcgtccggaatcctcagcggatatgctcgccagtgcgcagagggcatttgatgaggcggataaaaatggcagtggtaccagagccggagccagcgcccgggggaaagacctcctccttttcgtgtccgaacccttcaggggggcatggg

SEQ ID NO: 550 - DNA, 536 bp, Escherichia coli
gatgaccgggaaaatgcccgtctgggtctggcagcggccacgctgcagtcggatatggaaaaagccggtgaactggcggcaagggacagggctgagcgtgagtcgtcacagctgaagtataccggagaggcgcagaaggcgtatgagcgcctgcwgacgccactggakaaatataccgcccgkcagraagagctgaataaggccctgaaagacggaaaatcctgcaggcggattacaacacgctgatggcgtcggcaaaaaaggattatgaatcgacgctgaaaaagccgtcaggtgtgaaggtgtctgccggtgagcgccaggaagaccgggcgcatgcagccctgctggcgcttgaaaccgagctcaggacgctggaaaaacacagcggtgtgaatgagaaaatcagccagcagcgccgggatttatgggaagcggaaagtcagtatgtggtcctgaaagaggccgccacgaaacggcagttatctgagcaggaaaaatccctgctggctcatgagaaagagacgctggagtac

SEQ ID NO: 551 - DNA, 173 bp, Escherichia coli
caacgtcgccagctgtctgcacaggagaaatccctgctggcgcataaagatgagacgctggagtacaaacgccagctggctgcacttggcgacaaggttacgtatcaggagcgcctgaacgcgctggcgcagcaggcggataaattcgcacagcagcaacgggcaaaacgggc

SEQ ID NO: 552 - DNA, 65 bp, Escherichia coli
  modified_base (1)..(2): a, c, t, g, unknown or other
  modified_base (9)..(10): a, c, t, g, unknown or other
  modified_base (13)..(16): a, c, t, g, unknown or other
  modified_base (25)..(25): a, c, t, g, unknown or other
nncaccganngtnnnncgcagcggnagtcggaagagcagcgccttcgtgaggtgtacggtgataa

SEQ ID NO: 553 - DNA, 212 bp, Escherichia coli
  modified_base (1)..(6): a, c, t, g, unknown or other
  modified_base (108)..(112): a, c, t, g, unknown or other
  modified_base (121)..(121): a, c, t, g, unknown or other
  modified_base (131)..(131): a, c, t, g, unknown or other
  modified_base (211)..(212): a, c, t, g, unknown or other
nnnnnncactgaagaacacctggtctgcggaggagcagcttcgtggaagctggatggccgggatgaagtccggctgggggmgagtgggcggaaagtgcgacggacagnnnnncgcaggttnaaaacgcggncacgcagacctttgatggtattgcacagaatatggcagcgatgctgaccggcagcgaacagaactggcgtggtttcaccnn

SEQ ID NO: 554 - DNA, 1427 bp, Escherichia coli
  modified_base (1333)..(1333): a, c, t, g, unknown or other
acaactggcgctgggaactacaggctgacagtccgggcagtaaatgcgtgggggcagcagggcgatccggcatcggtatcgttccggattgccgcaccggcagcaccgtcgcggattgagctgacgccgggctattttcagataaccgccacgccgcatcttgccgtttatgacccgacggtacagtttgagttctggttctcggaaaagcggattgcggatatcaggcaggttgaaaccgcagcccgctatcttggctcggcgctgtactggatagctgccagtatcaatatcaaaccgggccatgattattatttttatatccgcagtgtgaatactgttggcaaatcggcattcgtggaggccgtcggtcgggcgagcgatgatgcggaaggttacctggattttttcaaaggagaaatcgggaaaacacatctggcccaggagttgtggacgcagattgataacggtcagcttgcgccggacctggctgaaatcaggacgtccattacgaatgtcagcaatgaaatcacgcagaccgtcaataaaaaactggaagaccagagtgcggcaatccagcagatacagaaagttcaggttgatacaaataataacctgaacagcatgtgggccgtgaaactgcagcagatgaaggacggacgcctttatattgcgggtatcggtgccggtattgagaacacccctgacggcatgcagagtcaggtgcttctggctgctgaccggattgcgatgattaatcctgcgaatggcaacacaaagccgatgtttgttggtcagggcgatcagatattcatgaacgacgtgttcctgaaacgcctgacggctccgaccattaccagcggcggtaatcctccggcattttccctgacaccggacgggcggctgacggcgaaaaatgccgatatcagcggtaacgtgaatgcgaactccgggacgctcaacaacgtcacgattaacgagaactgtcgggttctgggaaaattgtccgccaaccagattgaaggcgatctcgttaaaacagtgggcaaagctttcccccgggactcccgtgcaccggaacggtggccatcagggaccatcaccgtcagggtttatgacgatcagccgtttgaccggcagattgttattccggcggtggcattcagcggcgctaaacatgagcgggagaataacgatatttattcgtcatgccgcctgatagtacggaaaaacggtgctgaaatttataaccgtaccgcgctggataatacgctgatttacagtggtgttattgatatgcctgccggtcacggtcacatgacactggagtttncggtgtcagcatggctggtraataactggtatcccaccagcaagtatcagcgatttgctggttgtggtgatgaagaaagccaccgcaggcatca

SEQ ID NO: 555 - DNA, 72 bp, Escherichia coli
  modified_base (5)..(5): a, c, t, g, unknown or other
  modified_base (8)..(8): a, c, t, g, unknown or other
  modified_base (26)..(26): a, c, t, g, unknown or other
  modified_base (33)..(42): a, c, t, g, unknown or other
  modified_base (46)..(51): a, c, t, g, unknown or other
  modified_base (55)..(59): a, c, t, g, unknown or other
  modified_base (68)..(70): a, c, t, g, unknown or other
  modified_base (72)..(72): a, c, t, g, unknown or other
tatanccnatatacgggcgccagaantggcgcnnnnnnnnnngcannnnnncgannnnnaattatgcnnnan

SEQ ID NO: 556 - DNA, 251394 bp, Escherichia coli
gtttttttttttaaaaaaacggggtatcttcatgcctcgacgaacgttcccggtagtgatgatctgaacgggattaacgtgaaataccgttatgagtttacggacgcgctggggctgattacgtccttcagttatgccaatgctgaggatgagcaaaaaacgcgctacagcgatacccgctggcatgaagattccgtgcgtaaccgctggttcagcgtgatggcggggccgtctgtacgcgtgaatgaatggttcagcgcgtattcgatggcgggtgtggcttacagccgtgtgtcgactttctccggggattatctccgcgtaactgacaacaaggggaaacgcacgatgtgctgaccggaagtgatgacggtcgccacagcaacacgtctctggcgtggggggctggcgtgcagtttaacccgaccgaatccgtgaccattgaccttgcttatgaaggttccggtagtggcgactggcgaacggatgcatttattgttggtatcggataccgtttctgacaacagacgccgatttatcttctgtaaatattgttatgatacgcaggttcatccactttatggggtgaactgcgtttgaggaaacgtaaagttacactgtcctgaagcccgtggcgtcactgctgcgggctttttttattggtggaaaagtatgacagtaaaaatttctggcgtgcttaaagatggcacaggaaaaccagtacagaactgcaccattgtgctgaaggccagacgaaccagcagcacggtggtggtgaacacggtggcctctgaaaatccggatgaagccggacgttacagcatggatgttgagcatggtcagtacagcgtcaccctgctggttgaaggttttccgccttcacatgccgggaccattaccgtctatgaaggttccagaccaggtacgctgaatgattttctcggtgccatgacggaggatgatgtccgaccggaggcactgcgccgctttgagcagatggtggaagaggtgtcacgtaacgcctccgcggttgcacagaatacggcagccgcgaaaaaatcagccagcgatgccagtgcatcagccagcgaggcggcaactcatgcaaccgatgctgcagcctcagcacgtgccgccagcacgtcagccggacaggccgcgtcgtcggctcagtcagcgtcttccagcgcaggaacggcatcgacaaaggcccgtgaagcagcaaaaagtgctgctgctgcagagtcatcaaaaagcgcggcagctaccagcgccagtgccgcgaaaacgtcagaaacgaatgccgcagcatcacaaaaatcggcagccacttctgcatccacagcgaccacgaaggcgtcagaagctgccacctcggcacggggtgcggcggcctcaaaagaggcagcgaaatcttcagaaacgaatgcatcatcaagtgccagtagtgcagcttcctcggcaacggcggcaggaaattccgcgaaggcggcaaagacgtccgagacgaacgccaggtcttctgaaacggcagcgggacagagtgcctcagctgcggcaggctcaaaaacagcggctgcatcatctgccagtgccgcgtcaacaagtgccgggcaggcctcagccagtgccaccgccgccggaaaatcggcagaaagcgccgcatcatccgcttcaacagccacaacgaaggctggcaaagccactgaacaggccagtgcagcagcaaggtctgcttccgcagcgaagacatccgagacgaacgcgaaagcgtcggaaaccagcgcagaatcctcaaaaacggctgccgcatcgtccgccagttcggcggcgtcatcggcatcatcggcgtcagcttcaaaagatgaggcgaccagacaggcgtcagcagcgaagggcagcgccacgacagcatccacgaaggcgacagaggcagctggcagtgcgacggcggcagcacagagcaaaagtacggcggaatccgcggcaacgcgcgccgagacagcggcaaaacgggcagaggatattgcatccgccgtggcgcttgaggatgcaagtacgacgaaaaaggggatagtacagctcagcagtgcgaccaacagcacatctgaaacgcttgccgcgacaccgaaggcagttaaagcagcgaatgacaatgcgaatggcagggtaccatctaaccgaaaagttaacgggaaagcactgactgcggatataacattaacaccgaaagatattggcactttaaattcagtaacgatctctttctctggcggggcagggtggttcaaactggcaacggttaccatgccacaagcgagttccatcgtttacatcgcattgattggtggcgctggttttaacgtgggggcacctcaacaggcaggtatatctgaactggttctacgagcaggcaatggaaaccccaaaggggttaccggagctttgtggaagcgtacagccgtcggattaacgaatttcgcctggatcaacacatccggcgatatatatgatatttacgttgagattggcaattatgcgacgagtgtaaatatccattgggattgtactacaaatgcgtcagtttctatttatacctcgctaacatattcagcgagtaagccttccagcgttaccggtggtgttgtttatacgatgtatagctcacatcagaaacctacaccatcagatattggagcgctgccaacgactggagggactatttcaggtccgttgtctgttactgatgggatcaccggggcactgaaggggaacgccgataccgcgacgaaacttgcggcagacccaaaaattaacggtgttaagtttgatggctcggcggatattaacctcacgccggaaaatattggtgcatttgcccgacgttcgacgggggcttatgcggattcggatggagccgttccctggaatgccgaatcaggcgcttacaatgtcacccgctctggcgacagctatattctggttaacttctataccggagtcggaagttgccggaccctgcagatgaaggcgcattacagaaatggtggtctgttctaccgttcttcaagagacggttatggttttgaggaagactgggcagaagtttatacctcgaaaaatcttccaccagaaagctacccagtcggtgcaccaatcccgtggccatcagataccgttccgtctggttatgccctgatgcaggggcagacttttaacaaatctgcctacccgaaacttgcagccgcttatccgtcaggcgtgatccctgatatgcgtggctggacgattaagggcaaacctgccagtggtcgggccgtattgtctcaggaacaggacggcattaaatcgcatacccacagcgccagcgcatccagtacggatttggggacgaaaaccacatcgtcgtttgattacggcactaaatccacgaataacaccggggcgcatacgcacagtctgagtggctctacggggtctgccggtgttcatactcatggtaatggtattcgttggccaggaggcggcggttctgcgttagcattttatgatggcggtgggttcacttatgtccatgattcacagtatcaagtaagcccggagacttcttcctatagatcgtattatcaacgtattcagacacagtcagcaggtgctcatacccactcgctgtctggtactgcagcaagttctggcgcacatgcacatactgtaggtattggtgcgcatacgcactccgttgcgattggttcacatggacacaccatcaccgttaacgctgcgggtaacgcggaaaacaccgtcaaaaacatcgcatttaactatattgtgaggcttgcataatggcattcagaatgagtgaacaagcacggaccataaaaatttataatctgctggccggaactaatgaatttattggtgaaggtgacgcatatattccgcctcatacaggtctgccagcaaacagtaccgatattgcaccgccagatattccggctggctttgtggctgttttcaacagtgatgaggcatcgtggcatctcgttgaagatcatcggggtaaaacggtttatgacgtagcttccggcgacgcgttatttatttctgaactcggcttattaccggaaaatgttacctggttatcgccggaaggggagtttcagaagtggaacggcacagcctgggtgaaggatacggaagcagaaaaactgttccggatccgggaggcggaagaaacaaaaaacaacctgatgcaggtagccagtgagcatattgcgccgcttcaggatgctgcagatctggaaattgcaacggaggaagaaacctcattgctggaagcctggaaaaagtatcgggtgttgctgaaccgtgttgatacatcaactgcacctgatattgagtggcctgcaaatcctgtcagggagtaatcattgggattatgccgcagcacgtcttaagcaagaacgtgctgcggttggatgctattttttccctgaagcggaaaacattactacagtaccttgaaccttggttttaacattctcgaaatgctctgagagtatatgtgttaagccttcttcggaatcttttgtgtttgaaaagatgcctttctgattgtaaatgcgcatcagtttttgaccgaagctattgtgcacaactccatcgccaagaattgtggctccgtatagagttccatcgtcagttaaggcctgcgccgcattgcgtattacacagctttttgtagatatatttccaggcaggcagtgaagaaggtaaaacatggaaatggaatcaaattgaccatgtaacgccgcgggataaggttcaaaaacatcatggctaattttatgtttaatttttgattccccagcccttgtagatgccgcgttcaggctagcttcgttcaaatccattaaagatatcagactactctcaggtacgtgagtaaggtaaaacccagttccaacaccaatatccagatggttgttacctacatgttccagaaagtgtggaagaaggtgttcctttgtaggacatccccatgcaagccgatttgatactcccaaaacccaccagtcataaagctttagggtaagtggtgtgtaaattttagccccatcatctgtgttttttttcattgatttcaccatgttatagttttatttgtgaattaaatcaattatggcgatgaattacaaggggttaaatgctgctgcagcatagcgatattgaaatagcctggtatgcttcgatacagcaggagccgaatggctggaagaccgtcaccacacagttctacatccaggaattcagtgagtatattgcgccactgcaggatgctgtagatctggaaatcgcaacggaggaagaaagatcgttgctggaggcatggaataaatatcgggtattgttgaatcgtgttgatacatcaactgtacctgatattgagtggcctgcaaatcctgtcagggagtaatcattgggattatgccgcagacacgtcgtatgcaggaacgtgctgcggttagtttgtgagctttcgatagtggttgttatttttgcccttatttgttccggaggccatggttcaatggtccgtctgccccctgtggtgatgtcagcaaaatcagccactgcgcgaaccacaatagcccgggaagatgctgaagatcaccaggtaaagctgtcagcgcagaaactggaagaactgctcgcatcaatggttaaggatgaggttgatcgcaatgatgggatttattgacgtcagcgagagcagaaggaagaactgaataacctgaatgatttacgctcaatcagagcgatgatgattggcagtaattagcggtcaatttcggtttttttggctgtgcgctccccgcccagcattgcgcgtcaattagccccaaaaaaacgaaaaagttacaatcaagtaaaaaattccttctgcaaaactaaaaaagatttcaataaaatcagacagttaaaagcataaaaaaaggtacaaaaaaacatctcaaagtcttgtttttttgcttcaaatacaattggttattgtgttttttgaaacctaccagtctggtacatggatatcgataccaccgccaattataagctaggcggtgcacagcaacacgatagcgtacgcctcgatccgtgggtgtttatgttctcagcaggatatcgtttttaattccacaaaaaaacgaccccgtaatatacggggtcaataaggacatggtataaagggtattatttcttcgcttctacgccatcagtttcagaacgaattaaaaatttctcagttgtttgcggaatatgctgaatcagccagtcggccatttgcttttcctcatttaaaatcgcttcgatgatcggaattgagactgtatcaccggcattttttgctgctgctaatagtgaggtgtaacaggcgatttcaaattgctcgaagacatatccgctaatagagcctttaactatttcatcagaagggaatataccaccgattgactgcccaagcgcagccattttactcatggaatctttaatgactgaacgtgaaatgtcattacgatcaagaatagtttccagttgaacaatctggtttttggtttcactaagatgttgttcaatacgagcgcgtagttcaggataattatctatacgactggccatggattcaagcatagattcggcttgcttttccattgcgtgggcgtcacgtaaccagtcatgataatgttcaatacgattcatgaaaatgtcctctttataaaatgactaaaagttaaaattcatatttcaggctttattttcggctttcttatttacgttattaagggccagatcagtcagtttgatgtcggtggccttttcttcttccagggtttctttcagaagcttcgctgctttacggtaacctaattgttcagccagcgtcgctaatgtcccgtaactggcaatctcataatgctcgactttctgtgctgcggcaatcagtgcggcatcacgcacttcgtttttctcggtactttcgatgacctcattagcttcttcaataagaccttccattgccacacatttcatgcgcttaattttcaggttcgattcggactccacaacttgatcaatacgttcaatctgtccatgagtttcctcgaggtgcgcatgaaaagcctgacttaatttttcatttgatgttgctcttgcgagttttgccagtgcccgggttaattgtttttctgcgctgtaggtatctgaaagcaggtgaataaatacatcttcaatggtcttcatattcatatttttctccagtgaaatcactgcgagccatacggcccgcagatgcaattatctttatcagctgatattaataattaacggtgaatcaggatttacctgatttattaccaccgctttgttgaccgccttttttacccgcttcagatgcgcgttgcggatcatttttaaaattaccgccgctatgctgaccgcctttacggcctgcgtcggatgccttctcacggtcttcggcgaaatttcctgaaccaccacgatgttcggccatgttatttctcccgttgcgttgcattgtttcattaatatgagtgttgtgtgtcgacactcattaaaattagtcgctaatgagaattagtcaaattaagcgcaacgagaagatagagggaaaatatattttgaggaacattctggatatattaacaattacctgaggaataagtgacttagagaaaattattgattttactggtgttatgttgcgggattaatttgtttgattatattactgttgggcggaaaaatgacgtaagttgacgttcgaccggggtaagcgaaacggtaaaaagataaatattaaatgaatttaggatttttccggcttcattaaagaaagttaaaatgccgccagcggaactggcggctgtgggattaactgcgcgtcgccgctttcatcggttgtacaaaaactttcagtgccaccagcattttctctggctcattaatatgttgctcgatgattttaacaatggccgaaccagaaatcgcgcccgcagctcctgcatcaatcgctgcttttacctgatccggggcggaaataccaaatccctgcaatggaggtgcagcgttgtactctttcagcttcgcaaccagatgattgaggggtaacgcggcgcggttttctgcgccggtcacgcctgctcgtgacagcaaataggtgtaaccacgaccgtaagaggctatctggcgcagcaggtcgtcatcggcatttggcgggcagatgaagataggtgcgacattatgacgcaacgcggcctggcggaagggcgcggactcttcaactggcacatcggcaaccagcaccgaatcgacgccgactttttcgcactgggcataaaactcatcaatgcctttgttaaacaccagattggcatacatcaacaggccaatgggaatggtcgggtgtttctggcgaatcagtgccagcatttcaaaacattgtgccggagtcacacctgccgcaaaagcgcgcagagtggcgttttgaatcgtcgggccatccgccagtgggtcggagaaggggatacctaactccagcgcgtcagcaccggcttcaattagcgtatcgataattttcaatgactgctcaatgcccggatcaccgagcgtgacgaaaggaacgaatgcgccttctttgcgctccttcaactgggcaaacagagattcgtagcgttccatcagatttcccctcgtgctttcaaaatatcgtgaacggtgaagatgtctttatcgccgcgaccggaaaggttaaccaccagtagctgctctttatccgggttttcgcgcatcattttcaacgcatgggccagggcgtgggaggattccagcgccgggatgatcccttcgtgcaggcacagcgttttgaaggcttcaagggcttcatcatcggtaatagacacgtaatcagcgcgtccagtgctgttaagatacgcgtgttgtgggccgacagacgggaaatccagtccggcggagatggagtaagattcttcaatctgcccgtcttcggtttgcatcatcggcgctttcataccgaaatagatacccacgcgaccatgttttagcggtgcgccgtgctcgccagtttcgataccgtgaccacctggctccacaccaatcaggccgacgttggtttcattgatgaaatcagcaaacatgccgatggcattcgaaccgccgccaacacaggcgataacggcatccggcaggcgaccttctctttccagaatctgcgctttggtttcttcgccaatcatccgctgaaactcacgcacaatggtcggataaggatgcgggccagctgcggtgcccagcatatagtgcgcggtttcgtaactaccggaccagtcgcgcagcgcctcgttacaggcatctttcagcgtcgcggaaccgctatgcaccgggatcacttccgcacccattaagcgcatacgaaaaacgttaggcgactggcgttcaacgtctttggcacccatataaatacggcatttcaggccgagcagggcgctggcaagggccgacgccacgccatgctgaccggcaccggtttcggcgatgatttcggttttacccatccgcttcgccagcaacgcctgccccagcacctggttagttttatgcgcgccgccgtgcagcaaatcttcacgcttgagatacagcgtggtgttcgtcccggctgtaatgttctggcatttggtcagcgcggttggacgcccggcatagtttttcagcaggtcgttgaactgagcctgaaattcaggatctttttgcgcactgacaaaagcttcttccagctggcgcagagcaggcatcaggatttgtggcacgtacatgccgccaaactcaccaaaataggggttaagtaatgttgtcattgttcctttccttaatatgcgcgcagcgtctggaaaaccgaggccaaaagacgtgcgtctttgatgcccggttgcgactctacagcagaattaaaatcaagtccggcgcagccggtttgtgccgcttccacgcagttatctgcgcctaagccccccgccagcagaacgttgccaagcgattgaccatttaatagtgaccagtcaaaacgttgcccgcttccaccctggccgttgtctaaaacatatttatcaacgtgctgaaactcgcgggcgggcagggtttcaccgacgcttaatgctttccagatggcaacatgtgctggcagagcttcacgcagcgtatcgatatacagctgttcttcattaccatgcagttgcactgccgccagcgataacaccttagctttgtccaccacatcggcaatatcgtgattgcggaacacgccaacatactgcaacggtgccgcagccatcacttcctgcgcctgttcaacgttgacgcaacgcggtgatgtcgcaacaaaaatcaacccaccgtaaatcgcgcccgcgtcataagctgctttagcatcttgcccacgcgtcaggccacatactttattctcacccagcaacacccggcgcacggcggcgtgcaaatcgtcatgggccatcaacgccgaaccaatcagaaaaccgttagcgaagtggcttaactcgcgcacctgagcgtaagtattgatgccggattcgctgattaccgtcacgttgtgccccagtttcggcgcaagctcgcgggtacggttgagatcaatcgacaaatcacgcagatcgcggttgttgatgccaacgacctttgcccccaatgcaatggcacgctccagttcctcttcattactgacttcggtcagcacacccatctccagactgtgggcgacggcggcaagctggcgatattgttcgtcatccagtactgaaagcattaataagcaggcatcggcctggtaatagcgcgccagatagatctggtaaggatcgataatgaagtctttacataaaatcggctgcggggcgatttggctgacgatggggaggaaatcaaagctcccctgaaaatatttctcatcagtcagcaccgaaattgccgaagcgtaatgtttataaatggcggcaatgcgtgctggatcgaaatcatcacggatcacgccttttgacggcgacgctttcttgcactccagaataaacgccgtgcgtgcaccctgtagcgcatcataaaaatgtcgcgtgctcggctgaacctcattctgaaaactggccagcggttgctgctgtttgcgggtttctacccaaatcgccttgtctgcgacgattttcgctaaaacggtttgcatcatttaccctcgtgccgccagcgcggtaactctgtcgtaagcggaaccactgcgcagtacctcaagaacggtttgcgcattggcttgcagatcttcatggccatgcaggcgcattaacatggcgacgttcgcagcgacggctgcttcatgggcggcgtcgcctttaccttgtaacaagcgtgttaaaatgtcacggttttcttccggtgttccgcctgccagttgctcctggtggtagggagtcaggccaaaatcttcagcggtcaattgatagctcttaatttcgccgtcatgcagctcggcaacgattgtcggcgcgtgtaatgaaacttcatccatcccgccgctgtgcaccaccgccgcgcgttgataccccagcacgcgcaaggtttcggcaatcggcagcaccagttccggactataaacaccaattaacgccagcggcggatgcgccgggttaatcaatggccccagcacattgaacagggtgcgggttttcagttgctggcgaaccggcatcgcgtggcggaatccggtgtgatacttcggcgcaaagaggaaacatacacctaactcatccagcgcctggcgcgatttatcggcgttcatatcaagattaataccgaacgctgccagcagatcggacgaaccagatttactggagacgctacggttgccgtgtttcgccactttcagcccacaggccgcggcgacaaacgcactggcggtagaaatattgatactgttgctgccgtcaccgccagtaccgacgatatcagcaaacagataatccgggcgcgggaacggcgcggcgttttccagtagcgcggttgctgctccggcgatctcgttcgggtgctcaccgcgaattttcatgctcaccagcgccgccgccagttgttccggcttcagctcgccacgcaccaccgctgaaaacagctggtggctttcttgttggctaagcgtctgcgcctgatacagtttttccagaatcggttgcagcgtgttggctggctctagtttctgctgcgcccaggccagcgtttgttccagcaggcgagcgccctgggtggtgagaatggattccggatggaactggaatccacaaacgcgatccgcatcgtgacgtactgccatcaccatgccattaaaatgggcgttgatggttaaaccggccggaatgttactgccaaccagcgagtgataacgcgccaccggcagcgggtttgttaatccggcaaacatcgcctgaccgtcatgttcaatgctcgacgctttaccgtgaagaatttcgcccgcctgaccgacatagcccccgtaagcttcgacaattgcctgatgtccgaggcaaatgccaataatgggcagcttgccacgcaagcgggtaaggagttccggcatacaaccggcttcgctcggcacaccgggggccaggagaaagcatcagtaccggattgctcatggtcgccaggcgttcaattaaggtctgcgccggaatatggttgcggtaaatcaccacgttatgcccattgctgcgcaactgatctgccaggttgtacgtaaaagagtcgatattatcgagcagcagtatgtcagccatcagaaagtctcctgtgcatgatgcgcggtggcaatagcgcgcagtacagcgcgggctttattacgggtttcgtcggcttccgactgcggaatagaatcaaggactacgccagcaccggcttgcacggtggcgataccgttttccaccagcgccgagcggatcacaatgcaggtgtcgagatcgccatgcgcggtgaaataacctaccgcgccgccgtagctgccgcggcgacgaccttccgcctcggcaattaactgcatggcgcgtactttcggcgcaccgcttaacgttcccatattcatacaggcgcggtaagcgtgcagggcgtcgagatcgtggcgcagctcaccgaccacgcgggagaccaggtgcatcacgtaagagtaacggtcaactttggtaagatcggcgacgtagcggctgccgggggtgcaaatgcgtgccagatcattacgggcgagatccaccagcatcagatgttcagaaagctctttatgatcggtacgcatttccagttcaatacggctgtcgagatctctgtccagcgagccatcggcacgacgaccgcgtggacgtgttccggcaatcgggtagatctcaatctggcggctggtggcgtcatacttgagcgaactttccggcgacgcgccaaacagggtgaaatcattatcctgcataaaaaacatgtacgggctgggattactctttttcagcacgtaataggccgccagcggtgacgggcagggcagagagaaacggcgagatggcaccacctggaaaatttctccagcgcgaatcgctttttgcaacaaacgcactacgccaccgaactcttcatcgctctgattacattcacaacgcatatgcggcacggaaaccactggcagcggcggcgcggcttcggtcagttgctgacgtagttcgttcaggcgagcagtgagacgttgtttttcttcttcattcggagcaaacaggctggcctgaatacgggtgctttttttctgatggtcaatcaccatcagagtttcagcgagataaaaacagaaatcagggcagttattttccgctgacagttgcggtaaatcttcaaatcccgccacaaggtcataagagaacaggccgccgaagaacattgcttctcgttcttccttcggtacattcaacagattctgcaataaacggaaagcgtcaaaaaccgaaagggagcataagcgagcgtcttcatccagcagtggactgacaggggggaagcgcagcacacggcagtttggtgattgttcattttccacacccgcaggcagggcgttatccagtagtgtcagcagggcttcgccgttgccggaaagtgcctgaattgtgacagtgtcacctaatgctgtaatgcgcagcgcactgtctaccagtagcaggctttttaaatcatctttgctgtcgatatctgcggattccagcagcagcgttgccggacgatccccacacaactggtgaaaaagcgcggtgggattgtcgcgataagcgccttcgcaggttagcagttcgagagtcggtttttgtgtttgcattgttattctctaattttgttcaaaaaaaagcccgctcattaggcgggctgggtatctgattgctttacgcatggtgaatacactgcccgtttcaggaagtgcgccaccaagctttcagtacgaaaattgctttcattgtcgataccctttttacgtgaacttgcgtactagttaactagttcgatgattaattgtcaacagctcatttcagaatatttgccagaaccgttatgatgtcggcgcaaaaaacattatccagaacgggagtgcgccttgagcgacacgaattatgcagtgatttacgacctgcacagccataccacagcttccgatggctgcctgacgccagaagcattggtgcaccgtgcagtcgagatgcgcgtcggcaccctggcgatcaccgaccatgacaccacagctgcaatcgcgccagcaagagaggaaatttcacgttcgggactggcgttgaatcttattcccggcgtggaaatttccacggtctgggaaaatcatgaaattcatattgtcgggctgaatattgatattactcatccgctaatgtgtgagttcctcgcgcagcagacagaacggcgcaatcagcgggcgcagctgattgccgaaagacttgaaaaagcgcaaatacctggggcgctggaaggcgcacaacgactggcgcagggcggcgcagtgacgcgcggtcattttgcgcgtttccttgttgagtgcggcaaagccagttcaatggcggatgtctttaaaaagtatctggcgcgcgggaaaaccggatacgttccgccacagtggtgtacaatagaacaagctattgatgtcattcatcattctggcggtaaggcggtgctagctcatcctgggcggtacaatcttagtgctaaatggctgaaaagattggttgcgcattttgccgaacaccacggtgacgcgatggaagtcgcgcagtgccagcaatcgcccaatgaacgtacccagctggcggcccttgcgcgtcagcatcatttatgggcatcacaaggatctgattttcatcagccatgcccgtggatcgaactgggtcgtaaactctggctgcccgcaggcgttgaaggcgtctggcagctatgggaacagccgcagaacaccacagagagggaattatgagccagtttttttatattcatcctgataacccacagcaacgtctgatcaaccaggcggtggagatcgtgcgtaaaggcggggtgattgtttatccaactgattccggctatgcgctcggctgtaaaattgaagataaaaacgcgatggagcgtatttgtcgtattcgccagctgccggacggtcacaactttaccctgatgtgtcgcgatctttctgaactctcgacctattcatttgttgataacgttgcgtttcgtttaatgaaaaacaacacgccgggcaactataccttcatcttgaaggggacgaaggaagtgccacgccgtctgttgcaggaaaaacgcaaaaccatcggtatgcgtgtgccttctaacccgattgcgcaggcgttgcttgaagcactgggcgaaccgatgctttccacttcgctaatgctgccaggcagcgaatttaccgaatccgatcccgaagaaattaaagaccgtctggaaaaacaggtagatttgattattcacggcggctatctcgggcagaaaccgacaacggttattgatcttaccgatgatacgccggtcgtggtgcgtgaaggcgtaggtgatgtgaagcctttcttataagtgcgtaactctgtatactacgcggccttaaaatggcgctatacggcgccattgattctcctgttcgacgcctgtgaaggcgacactaaaaggaagctctatgagcgaaaaattacagaaagtgctggcccgcgctggccacggctcccgccgtgaaatcgaatctattattgaagccggtcgtgtgagtgttgatggcaaaattgctaaactcggcgatcgcgttgaagttacccctgggctgaaaattcgtatcgatggtcatctgatttcggtacgtgagtccgctgaacaaatttgtcgcgttctggcctattacaaaccggaaggtgagttgtgtacccgtaacgatccggaagggcgtccgacggtgtttgaccgtctgccaaagctgcgtggcgcacgctggattgccgtaggtcgtctggacgttaacacctgtggtctgctgctgttcaccaccgatggtgaactggcaaaccgtttaatgcatccaagccgtgaagttgaacgtgaatacgccgtgcgtgtatttggtcaggttgacgacgcgaaactgcgtgatttgagtcgtggcgtgcaactggaagatggtccggcagcttttaaaaccatcaagttcagcggcggcgaagggatcaaccagtggtacaacgtgactctgaccgaaggccgtaaccgtgaagttcgtcgtctgtgggaagcggttggtgtgcaggtgagccgcctgatccgtgttcgttacggtgatatcccactgccaaaaggtctgccacgcggtggctggacggagctggacctcgcccagactaactatctgcgcgaactggtggagctaccgccagaaaccagctctaaagtcgctgtagaaaaagaccgtcgtcgcatgaaggcgaatcagattcgtcgtgcggtgaaacgtcacagtcaggtgagcggcggtcgtcgttctggcgggcgtaataacggttaatcaaagtatgccggacgtcatatccggcatttttacagattaataatcaatccctatttgcgccttaacaccggcatcaaacgcatgtttgatggggcgcagctcacttaccgtatccgccagttcaagaatatcccgatgacagcctcgacccgtgataatcaccgtctgttgatgtggacgttcatttaacgcctgcaccacttcttccagtggcaaatagtcatacgccaccatatacgtcagttcatcaagcaaaaccatatccagtgaggaatcagcaagcatccgctttgcatgttgccagacttcgcggcaggcggcggtatcagactcgcggttttgtgtatcccaggtaaagcccgttgccatcacctgaaactcaacgccatgtggctccagcagattgcgttcgccattaggccaggtgcctttaataaactgcacgacgcccactttttttccgtgaccaactgcgcgtgttgccgtaccaaatgccgcggtggttttgccttttccattgccggtaaagacgatgataataccgcgttcatcctgggcctgggccacacgagcatctactttttctttcactcgctgctgacgctgttggtagcgttcatcactcattgggaaattcctggtttacggcccggttgggcgtcaaaggtcatgccggttttacggcggctgtcatcgcccatcagccagaggtagagcggcatgatatcagcgggtgttttaagtttctgtggatcttcggtcgggaaggcgcttgcgcgcattgcggtgcgcgtaccgcctgggttaatgcagttgacgcgcaggcgctgctgatattcatcggccagtacctgcatcatcccttcggtggcaaatttcgacgctgcatatgcaccccagttagctcgtccctgacgtccaacgcttgatgaagtaaagaccagtgaaccggcgtccgatttgagtaataaaggaagcagtgcctgggtgagcataaaggtggcattaacgttgacctgcatgacgtcctgccagacctgcggattttgttcgctcattgggcaaatatcgccgagcaatccggcattatgcaaaacaccatccagacgcggataattaacgacaatgcgctgtgccagttgttggcaatcttcggacgtgcaggtcagcaaatcgagaataaaccactgtggctgacgtccagtttcttcgtttatgtggctggctacctgacgtaatttttcttcattacggcccaacagaatcactgtcgcaccatagcgtgcatacgtcatcgcggcttcacggccaatcccatcgctggctcccgtcaccaggataatgcgatcattgagtaaatcttgttttggctggtaatgcatggctactcctcaacgacgttgtctgtcgcgctgccagtgtactttatgactttggggctttatgcctgaaacagaagggcatttcaatcagcctggggcgataacaccgcaaaatggatactttgtcatactttcgctgcaataacatctctgcgagacggcttaacatgcctgttgtaaactgtgagccaaagcgttgtttaaccaaggtggggactcgtggaattgttgtctgaatatggtttgtttttggcgaaaatcgttaccgttgtgctagcgattgcggcgattgccgccattattgtcaatgttgctcaacgtaataaacgccagcgtggcgagttacgggtcaacaatctcagcgaacagtataaggagatgaaagaagaactagccgcggcgctgatggactcacatcagcaaaaacagtggcacaaagcgcagaagaaaaagcacaagcaagaagcgaaagcagcaaaagcgaaagccaaactgggcgaggtggcaactgacagtaaacctcgcgtctgggtgctggattttaaaggcagcatggacgcccatgaagtgaactcgctacgtgaagagataacggctgtactcgcagcattcaaaccgcaggatcaggttgtgctacgtctggaaagccctggtggcatggtgcatggttacgggttggcggcttcgcagctgcagcgtctgcgtgataaaaacattcctttaactgttacggtagacaaagtcgctgccagcggcggttacatgatggcctgtgtggcggacaaaattgtttccgcaccgtttgctattgtgggttccattggggtggtggcgcaaatgcccaactttaaccgcttcctgaaaagcaaagatattgatatcgaactgcacactgccgggcagtataagcgtactctgacgttgctgggtgaaaataccgaagaagggcgggagaaattccgcgaagagttgaacgaaacgcatcagttgtttaaagattttgtgaagcgtatgcgtccgtctctggatattgaacaggtggcaacgggtgaacactggtacggacaacaggcggtagagaaaggcctggttgatgaaatcaacaccagtgatgaagttattcttagcctgatggaaggccgtgaagtggttaatgtacgctatatgcagcgtaaacgactcattgaccgattcaccggcagcgcggcagagagcgccgatcgattgttgctacgctggtggcagcggggtcaaaagccattgatgtaaaagacaaacgcgaggctaagacctcgcgttttgctttaatcaaccagatgatatttttctgaaagcacatgggccaggtgtttgaacatattaaacaccgcggtgcttttggctgttggcaatccttgttcatctaaaaagtagtcgccggtaaataccagcacgccattacgctgcgtgacgccggtggcttcaatccctgcgagcgtatcctcatgctcacgaatgattttgttggcctctttcaacagcgtttcgcggtcgatgggttgtgtctctttgttcattatttactccttaaacaaggacattagtctacgccaggcatggcttgcagacaaatataccacgctggtggcaagagcgccttactggtaactttggattttgcatgctaataaagttgcgtatcggattttatcaggtacagtgtgacgctttcgtcaatctggcaatagatttgcttgacattcgacccaaattccgtcgtgctatagcgcctgtaggccaagacctgttaactcagtcacctgaattttcgtgaacagagtcacgacaaggggttgatatccgcagagaacgagtccatatcggtaactcgttgccagtggaaggtttatcaacgtgcgacgcattcctggaagaatcaaattaggtaaggtgaatatgggtaaagctcttgtcatcgttgagtccccggcaaaagccaaaacgatcaacaagtatctgggtagtgactacgtggtgaaatccagcgtcggtcacatccgcgatttgccgaccagtggctcagctgccaaaaagagtgccgactctacctccaccaagacggctaaaaagcctaaaaaggatgaacgtggcgctctcgtcaaccgtatgggggttgacccgtggcacaattgggaggcgcactatgaagtgttgcctggtaaagagaaggtcgtctctgaactgaaacaactggctgaaaaagccgaccacatctatctcgcaaccgaccttgaccgcgaaggggaagccattgcatggcacctgcgggaagtgattgggggtgatgatgcgcgctatagccgagtggtgtttaacgaaattactaaaaacgcgatccgccaggcatttaataaaccgggtgagctgaatattgatcgtgttaatgcccagcaggcgcgtcgctttatggaccgcgtggtggggtatatggtttcgccgctgctatggaaaaagatcgctcgtggtctgtctgccggtcgtgtgcagtcggtggcggttcgcctggtggtcgagcgtgagcgtgaaattaaagcgttcgtgccggaagagttctgggaagtcgatgccagcacgaccacgccatctggtgaagcgttggcgttacaggtgactcatcagaacgacaaaccgttccgtccggtcaacaaagaacaaactcaggctgcggtaagtctgctggaaaaagcgcgctacagcgtgctggaacgtgaagacaaaccgacaaccagtaaacctggcgctccttttattacctctacgctgcaacaagctgccagcacccgtcttggatttggcgtgaaaaaaaccatgatgatggcgcagcgtttgtatgaagcaggctatatcacttacatgcgtaccgactccactaacctgagtcaggacgcggtaaatatggttcgcggttatatcagcgataattttggtaagaaatatctgccggaaagtccgaatcagtacgccagcaaagaaaactcacaggaagcgcacgaagcgattcgtccttctgacgtcaatgtgatggcggaatcgctgaaggatatggaagcagatgcgcagaaactgtaccagttaatctggcgtcagttcgtagcctgccagatgaccccagcgaaatatgactccacgacgctgaccgttggtgcgggcgatttccgcctgaaagcacgcggtcgtattttgcgttttgatggctggacaaaagtgatgcctgcgttgcgtaaaggcgatgaagatcgcatcttaccagcagttaataaaggcgatgctctgacgctcgttgaacttacaccagcccagcactttaccaagccgccagcccgtttcagtgaagcatcgctggttaaagagctggaaaaacgtggtatcggtcgtccgtctacctatgcgtcgatcatttcgaccattcaggatcgtggctacgtgcgagtagaaaatcgtcgtttctatgcggaaaaaatgggcgaaatcgtcaccgatcgccttgaagaaaatttccgcgagttaatgaactacgactttaccgcgcagatggaaaacagcctcgaccaggtggcaaatcacgaagcagagtggaaagctgtactggatcacttcttctcggatttcacccagcagttagataaagctgaaaaagatccggaagagggtggtatgcgcccgaaccagatggttctgaccagcattgactgcccgacttgtggtcgcaaaatggggattcgcacagcgagcaccggggtattccttggctgttctggctatgcgctgccgccgaaagagcgttgcaaaaccaccattaacctggtgccggaaaacgaagtgctgaacgtgctggaaggcgaagatgctgaaaccaacgcgctgcgcgcaaaacgtcgttgcccgaaatgcggcacggcgatggacagctatctcatcgatccgaaacgtaagttgcatgtctgtggtaataacccaacctgcgacggttacgagatcgaagagggcgaattccgcattaaaggttatgacggcccgatcgttgagtgtgaaaaatgtggctctgaaatgcacctgaaaatggggcgtttcggtaaatacatggcctgcaccaacgaagagtgtaaaaacacacgtaagattttacgtaacggcgaagtggcaccaccgaaagaagatccggtgccattacctgagctgccgtgcgaaaaatcagatgcttatttcgtgctgcgtgacggtgctgccggtgtgttcctggctgccaacactttcccgaaatcgcgtgaaacgcgtgcgccactggtggaagagctttatcgcttccgcgaccgtctgccggaaaaactgcgttatctggccgatgcgccacagcaggatccggaaggtaataagaccatggttcgctttagccgtaaaaccaaacagcaatatgtctcttcggaaaaagacggaaaggcgactggctggtcagcattttatgttgatggcaaatgggttgaaggaaaaaaataacctttaattctgtcaggtttttataaacaaagggtcgcgaaagcggcccttttttattgcatattattttttcttcaaacctatacactaaggctataaatgatatagtggttatagttagcaccttttttattattaaatcgtattagtcacccgccaggtgtgacgaaaaaacgatgttctgatggcgtctaagtggatggtttaacatgaaattacaacaacttcgctatattgttgaggtggtcaatcataacctgaatgtctcatcaacagcggaaggactttacacatcacaacccgggatcagtaaacaagtcagaatgctggaagacgagctaggcattcaaattttttcccgaagcggcaagcacctgacgcaggtaacgccagcaggacaagaaataattcgtatcgctcgcgaagtcctgtcgaaagtcgatgccataaaatcggttgccggtgagcacacctggccggataaaggctcgctgtatatcgccaccacgcatacccaggcacgctacgcgttaccaaacgttatcaaaggctttattgagcgttatccccgcgtttctttgcatatgcaccagggctcgccgacacaaattgctgatgccgtctctaaaggcaatgctgatttcgctatcgccacagaagcgctgcatctgtatgaagatttagtgatgttaccgtgctaccactggaatcgggctattgtagtcactccggatcacccgctggcaggcaaaaaagccattaccattgaagaactggcgcaatatccgttggtgacatataccttcggctttaccggacgttcagaactggatactgcctttaaccgcgcagggttaacgccgcgtatcgtcttcacggcaacggatgctgacgtcattaaaacttacgtccggttagggctgggggtaggggtcattgccagcatggcggtggatccggtcgccgatcccgaccttgtgcgtgttgatgctcacgatatcttcagccacagtacaaccaaaattggttttcgccgtagtactttcttgcgcagttatatgtatgatttcattcagcgttttgcaccgcatttaacgcgtgatgtcgttgatgcggctgtcgcattgcgctctaatgaagaaattgaggtcatgtttaaagatataaaactgccggaaaaataattttttgcgttattttcggcaccttttatgtagcgaaggtgccggaatatattctcttttgttacttatttctataccgtgcacaatatttttatccctcatatttatagggtaaattacctgtaaagtagtgtctaattacccgcctcgcaaactccagttttcaaatatctatttcaggtcaaaagattgaattattcactgagacgattcgtaaattcgctggatttttgactaaagtttctttaggatttgtctcatcgtatgattaattacaccaatcgttcaacgtcttgctgataagtgatggcgattatatgaggttagcaatgccttctggaaatcaggaaccccgccgcgatcctgaattaaaacgtaaagcctggctggcggtttttcttggttctgcacttttctgggtggttgtcgcactgctgatttggaaagtgtggggataactatggtcggtcaggagcaactggagtcgtcaccattatgccagcatagtgacaatgaaacagaaacgaaacgggaatgttccgtcgttattccagacgactggcaactaacatcgcagcagcaagcctttatagaactgtttgctgaagatgatcagccgaaacaataattatcatcattcttattacccatttttaatgaattaaagggcttttaatacaccgcagcaataacagcttgagttatctcaacacaaaataataaccgttaagggtgtagcctatgatcaacacaaatatgaaatattggtcctggatgggcgcgttttctctgtcgatgctcttctgggccgaactcctctggatcattactcactgatccttgaccccgctgcggcggggttgtcatttgctttgccacaaggtttctcctcttttatcaatttgggttgttatcaaatcgttacgcgatgtttgtgttatctttaatattcaccctgaagagaatcagggcttcgcaaccctgtcattaaggaggagctatgtcgtcaaccctacgagaagccagtaaggacacgttgcaggccaaagataaaacttaccactactacagcctgccgcttgctgctaaatcactgggcgatatcacccgtctacccaagtcactcaaagttttgctcgaaaacctgctgcgctggcaggatggtaactcggttaccgaagaggatatccacgcgctggcaggatggctgaaaaatgcccatgctgaccgtgaaattgcctaccgcccggcaagggtgctgatgcaggactttaccggcgtacctgccgttgttgatctggcggcaatgcgcgaagcggttaaacgcctcggcggcgatactgcaaaggttaacccgctctcaccggtcgacctggtcattgaccactcggtgaccgtcgatcgttttggtgatgatgaggcatttgaagaaaacgtacgcctggaaatggagcgcaaccacgaacgttatgtgttcctgaaatggggaaagcaagcgttcagtcggtttagcgtcgtgccgccaggcacaggcatttgccatcaggttaacctcgaatatctcggcaaagcagtgtggagtgaattgcaggacggtgaatggattgcttatccggatacactcgttggtactgactcgcacaccactatgatcaacggccttggcgtgctggggtggggcgtgggtgggatcgaagcagaagccgcaatgttaggccagccggtttccatgcttatcccggacgtagtgggctttaaacttaccggtaaattacgtgaaggtattaccgccacagacctggttctcactgttacccaaatgctgcgcaaacatggcgtggtggggaaattcgtcgaattttatggtgatggtctggattcactaccgctggcggatcgcgccaccattgccaatatgtcgccagaatatggtgccacctgtggcttcttcccaatcgatgctgtaaccctcgattacatgcgtttaagcgggcgcagcgaagatcaggttgagttggtcgaaaaatatgccaaagcgcagggcatgtggcgtaacccgggcgatgaaccgatttttaccagtacgttagaactggatatgaatgacgttgaagcgagcctggcagggccaaaacgcccacaggatcgcgttgcactgcccgatgtaccaaaagcatttgccgccagtaacgaactggaagtgaatgccacgcataaagatcgccagccggtcgattatgttatgaacggacatcagtatcagttacctgatggcgctgtggtcattgctgcgataacctcgtgcaccaacacctctaacccaagtgtgctgatggctgcaggcttgctggcgaaaaagccgtaactcttggcctcaagcggcaaccgtgggtcaaagcgtcgctggcaccaggctcgaaagttgtttctgattatctggcaaaagcgaaattgacaccgtatctcgacgaactggggtttaaccttgtgggatacggttgtaccacctgtattggtaactctgggccgctgcccgatcctatcgaaacggcaatcaaaaaaggcgatttaaccgtcggtgcagtgctgtccggcaaccgtaactttgaaggccgtatccatccgctggttaaaaccaactggctggcctcgccgccgctggtggttgcctatgcgctggcgggaaatatgaatatcaacctggcttctgagcctatcggccatgatcgtaaaggcgatccggtatatctgaaagatatctggccatcggcacaagaaattgcccgtgcggtagaacaagtctccacagaaatgttccgcaaagagtacgcagaagtttttgaaggcacagcagagtggaaggaaattaacgtcacacgatccgatacctacggttggcaggaggactcaacctatattcgcttatcgcctttctttgatgaaatgcaggcaacaccagcaccagtggaagatattcacggtgcgcggatcctcgcaatgctgggggattcagtcaccactgaccatatctctccggcgggcagtattaagcccgacagcccagcgggtcgatatctacaaggtcggggtgttgagcgaaaagactttaactcctacggttcgcggcgtggtaaccatgaagtgatgatgcgcggcaccttcgccaatattcgcatccgtaatgaaatggtgcctggcgttgaaggggggatgacgcggcatttacctgacagcgacgtagtctctatttatgatgctgcgatgcgctataagcaggaacaaacgccgctggcggtgattgccgggaaagagtatggatcaggctcaagccgtgactgggcggcaaaaggtcctcgtctgcttggaattcgtgtggtgattgccgaatcgtttgaacgaattcaccgttcgaatttaattggcatgggcatcctgccgctggaatttccgcaaggcgtaacgcgtaaaacgttaggactaaccggggaagagaagattgatattggcgatctgcaaaatctacaacccggtgcgacggttccggtgacgcttacgcgcgcggatggtagccaggaggtcgtaccctgccgttgtcgtatcgacaccgcgacggagttgacctactaccagaacgacggcattttgcattatgtcattcgtaatatgttgaagtaacaagtatttgcttgccggttattttgcttccggcaagcaaactaattacacaatgcaagagggttatttgttcagcaaatggcccattttctcggctttggtatcgagataatgttcgttattggggttacgacctacaatcaatggtacgcgttcaacaatattaatccctgcttcggtcagaatttcgacttttttcgggttattggttaacaagcggacttcattgacgccaaggagtttgaacatatcagcgcaaagagtgaagtcgcgctcatcagcggcgaagcctaactggtggttagcctctacggtatcgtaaccttgatcctgcagtgcgtaagcgcggattttattcagcagaccaatgttacgaccttcctgacggtgatacagcaaaataccacggccttcctcggcaatttgcgtcaatgccgcttcgagctggaagccacaatcgcagcgcaagctgaacagggcgtcaccggtcagacattcggaatggacgcgcgcaagtaccggggtatgcccggaaatatcgccatagactagcgcgacatgatcgtgtccggttgccagttcttcaaatcccaccatcaggaaatcgccccatggggttggcagtttggcttctgccacacgtttaagctgcatgaaattctccagataatgctggttctgtattggcttattttgccataacgagaaggggttcacctaatcacgacgcgtcgatcgttcacggaatggcacaaatctgtcaatttttcctggaactggcgttttcagttatgattgtgggacttatcaaaaaggagaggccatgcgttcgattgccagacgtaccgcagtgggagctgcactattgcttgtcatgccagtagccgtatggatttctggctggcgttggcaacctggagaacaaagttggctactaaaagcggctttttgggttactgaaactgtcacccagccctggggcgtcattacacatttgattttattcggctggtttctctggtgtctgcgttttcgcattaaggctgcctttgtattatttgccattctggcggccgcaatccttgtgggacaaggcgttaaatcctggatcaaagacaaagtccaggaaccacgaccttttgttatctggctggaaaaaacacatcatattccggttgatgagttctacactttaaagcgagcagaacgcggaaatctagtgaaagaacagttggctgaagagaaaaatatcccacaatatttgcgttcacactggcagaaagagacggggtttgcctttccttccggtcacacgatgtttgctgccagttgggcactgctggccgttggtttgctgtggccgcgtcggcgaacgttaaccattgctatcttgctggtctgggcaacgggagtcatgggaagccgcctgctgctcgggatgcattggccacgcgatctggtagtagctacgttgatttcgtgggcgctggtggcggtggcaacgtggcttgcgcaacgaatttgtgggccattaacaccacctgcggaagaaaatcgcgaaatagcgcaacgagaacaagaaagttaacgctggttgattttccgaatttagcccttaaatcatcaacaatgcgcgtggatgccatttcgcagacggcgcgaaaatggtactttaaagggctattgcggtaagttgaccataatttattcgctctaaccacataacgggaagtaatgtgaaatatttactcattttcttactggtgttagcgatcttcgtgatttcggtcacgttgggtgcgcagaacgatcaacaggtgacgtttaattatctgttagcgcaaggggagtaccgtatttccacattgctggcggtattgtttgctgcggggtttgctatcggttggttgatttgtggcctgttctggctgcgagttcgtgtttccctggcgcgcgctgaacgtaaaataaagcgactggaaaaccagctttcacccgcgactgacgtggctgtagtgccgcactcgtcagcggcgaaggaataactttctatgctggagttgttgtttctgcttttgcctgtagccgctgcctatggctggtatatgggccgcagaagtgcgcaacaaaacaagcaagatgaagccaaccgcttgtcgcgtgattacgtagcgggggttaacttcctgcttagtaatcaacaggataaagcggtagacctgtttctcgatatgcttaaagaggatacaggcaccgttgaagcccaccttacgctcggaaacctgttccgttcgcgtggcgaagttgatcgcgctattcgcatccatcagaccctaatggaaagcgcctcgctgacctatgaacagcgtctgttggcgattcaacaactagggcgtgattacatggccgccgggttatacgaccgcgcggaagacatgttcaatcagctgaccgatgaaactgacttccgcattggcgctctgcaacagttgctacaaatctaccaggctaccagtgagtggcagaaagcaattgatgttgccgaacgcctggtgaagctgggtaaagataaacagcgcgtcgaaattgcccatttctactgtgagttagccctgcagcatatggccagcgacgatctcgatcgtgccatgaccttgctaaaaaaaggggcggcggcagataaaaacagcgcccgcgtatccatcatgatgggacgcgtgtttatggcgaaaggagaatacgccaaagccgtcgaaagtttgcaacgcgtgatatcccaggacagagaactggtcagcgaaacgctggaaatgttgcaaacctgctatcagcagttgggtaaaactgccgaatgggcagaattcctgcaacgcgcggtggaagagaacaccggtgccgatgctgaattgatgcttgctgatatcatcgaagcgcgcgacggtagtgaggccgcacaggtctatattacgcgccagcttcagcgtcatccgaccatgcgtgtgttccataagttaatggattaccacttaaatgaagcggaagaagggcgtgccaaagagagcctgatggtgctgcgtgacatggttggcgaaaaggtacgtagtaagcctcgttatcgctgccagaaatgtggttttaccgcatacaccctctactggcattgtccgtcttgtcgggcctggtcaaccattaaaccgattcgcggtcttgatggcctgtaatttttaaaaaaatcctactttagttacaacatactagttattgatgttccattgtgctccggcaacgacggcgcagaaaaagcctgccaggggaaaaatcgcaactgttaattttttatttccacgggtagaatgctcgccgtttacctgtttcgcgccacttccggtgcccatcatcaagaaggtctggtcatgacgttaactgcttcatcttcttcccgcgctgttacgaattctcctgtggttgttgcccttgattatcataatcgtgatgacgcgctgtcctttgtcgacaagatcgacccacgcgattgtcgtctgaaggtcggcaaagagatgtttacattgtttgggccacagtttgtgcgcgaacttcaacagcgtggttttgatatctttcttgacctgaaattccacgatattcctaacactgcagcgcacgctgtcgctgctgcagctgacttaggcgtgtggatggtgaatgttcatgcctctggtggggcgcgtatgatgaccgcagcgcgtgaggcactggttccgtttggcaaagatgcaccgcttttgattgctgtgacagtgttgaccagcatggaagccagcgacctggtcgatcttggcatgacactgtcacctgcagattatgcagaacgtctggcggcactgacgcaaaaatgtggccttgatggtgtggtgtgttctgctcaggaagctgtgcgctttaaacaggtattcggtcaggagttcaaactggttacgccgggcattcgtccgcaggggagtgaagctggtgaccagcgccgcattatgacgccagaacaggcgttgtcggctggtgttgattatatggtgattggtcgcccggtaacgcaatcggtagatccagcgcagacgctgaaagcgatcaacgcctctttacagcggagtgcatgatgagtgattccaacagccgtctggtctactcaacggaaaccggacgtattgatgagcccaaagcggcccctgtacgccctaaaggcgacggtgtggtgcgtattcagcgtcagaccagtggacgtaaaggtaagggcgtttgcctgattaccggtgtcgatctcgatgatgccgaactgacaaaacttgcagcggaactgaagaaaaaatgcggctgcggcggagcagttaaagatggagttattgaaatccagggcgataagcgtgatttattaaaatcactacttgaagcgaaagggatgaaggtaaaactcgcaggcggttaacataaaaagccacggatatatccgtggctttcgaatattttactgtgcgtattattcagttatttcgtactgaacagaatcaagcgtattataattgcgagtcgataatcgacatttatttacgattatttaccgacctggtgaccaataacaccaccgacagctgcaccacctaatgtacccaacgtactgccatcggtcagtactgcaccgcctaatgcccctgcacccgcgccgattgcggtgttgcggtcccgtttagaccagttagaacaggcactcagagacattgccaaagtaattgccagaacagccgcggtcatttttttgctcgttacaaacataatactctctcctgaatttatgattcacggaagtaagctctctataactataatagctaagaataagcctggtgaaattattccgtgaaatctgctcgcgcgcaggattatatcacgcaggtgataatgacttcctgttatatcgctgataataattttatatcttaagcgtgttaataacaggtaaatagtcttaattatcaaccaggaatcatcttagagcggatgatttgccaaactgcaaatcatccgtagagaagggaaatggttaaatgtcaacgacgtgaacggtgagtttactgtgctcaagatgcatcagatcgctggcgcgtattttcgaatcggtaatcacgcgattgaatcgctcaacgggaccgatggagtatgaatgtacagcaccaaatttcgagctgtcagtcaggactatcgcttcgcactctttttccagcacggcattgaccacatcggtacgcatcatatcgcgaccggtgaatccagtttcaggttgccagccatcaataccaataaatgctttgctgaaatgtacctgctggatgcactggcgtgtcaaagggccaaccatactttcgctttttttctggtacacgccaccgagcaaaatgacttcacaaggcgcgtctttcagcaaatgcgcaatgtagctgctgactgtgatgatagtgacatttttcttctgttcgcccagagtccgggcgagcagggcattgctgctaccattttcgataaagatggtttcgcccggttgaaccagagacgcggcaaactcggcgagttcacgcttcagcgtatagttgctcatcatacgggtttcgacgtcatcactatcaagcgaaactgcaaagccatgtgcacggcggaggtaactcagtttttcgagggtgttgagatcctggcgaatggtaacttcagaaactccagtggcttttgccagatcggttacgctaacctgaccctggtcaatgaccatctgtagaatagtttgttgtcgggaattcatcgctgtaattcttataacgttataatactaaataaaaaaatactgacgcgccgggcatcctcaaataggaaaacctgaaggcacgattgttaaatctcccacggtgccttcgggatgtctggcgtagattcagcaacctggcgcaagagttctgctttaagtatctcgagattatggatcgcagagtggtaatcgcctgccacaaggatatctaacacaatatcaatacgttcggcaacgcgctgggcatcaaattcagacatcaaggacatccttatagcaaaagtggaaaatgaataatgcaaaaattgccgctaaaagagaagtgtttaacagcaacggctaattatcatccaggaatacgatatataatgacgggatatagcgctaagtatatatattcatctacttatgcgcgcttcagatagcgtttataccagcgttcgaaggcgacggcgggcatcggtttggcaaacaaaaatccttgccgctcattgatcccgttcttggttaaaaaagcatcttcttttgcactctctacaccttcggcgatcacctgaagattcaatgcctgggccacagcgacgatcgcccggaccagtgactgcgagacaggttgtttgtgaatatctcgaacaaaaacctggtcaagtttgatggcatcgatcggaaagcgcgccagttgcgaaagtgaagagtagccggtaccaaaatcatccagatgcacttgcgcacctagttggctaaattgttgaataacagacagtgccagttcatcattctcaatcagacaactctctgtcagttcaacatctatagggcagtattcaaaattgagttcctggagaacctgtttcagggcggtgaaaatggtttgatcggcgagctgacgtgcagaaatatttaccgccactcgcaggttaatacctttatcccgccacttcgccacctggcgtacgacatcgagaatcacccaacggcctaaaggcacaattagccctgactcttcggcgtaggaaatgaagtccaacggtggaatcaacccacgttcaggtgactgccaacgtactagtgcttccagactgcgcacttcgccacgccaggtgattttcggttgatagtgaataaccaactgatcgttttccagtgctttacgcaagttggtatccagccagagatattcaaatacccgttgattcatttctggggtaaaaacgcaaaattgtcctcgtccgccttccttcgctgtgtacattgctgtgtcggcgtgacgaataatagccgtgctgtctgaaccatgttcgggagagagtgcaatacctactgaacagctggtataaacttcaattaaaccaatgcgaaaggggagccgtaagcgggtcaaaattcgtgatgccattgcttccagcgcgctttgtgaggtgttggatgccagtaccagaaactcatcgccacctggacgcgccaacacctggtcatgttcgagacagcttaaaatagccaatgacacgtcgcgtaataactggtcaccaaacaaatgcccataggcgtcgttgacctttttgaaattatccaaatcaagatacacaaccccaactttattgttatctgcatgattaatagcgtgatcgattaaatcctgcattgcgttacgattcggcagtccggtgatactgtcggtatttgccagaatacgcagtcgctcctgagcgcggcgctcttcggtaatgtcggtgccggaacagattaaaaaaatctcgtttttgccactgccgctgtggacaaatttattgcgaaacagaaacagccgctggcctttacgtgttggtatccacagttcgacttcatatgcattgccgcttcgaaaaaatacacggttattgcgcctggatgccgcagcttcacgacggctcataaacagtttaaacacgctttggccaatgacgtcgtgttctttcaacccagtgtaatcttcacataaccgattgaagcgttggatattcccccggctgtcgagaatcactattgcggaatgtgcttcagaaactacctgctcagcaaaggaaagcccgtgtgataaatcacgagcaactgccggtgtgtcatgccatgcagacgcgttgccagcccattcccgtttattgatttttcgtcctaccagatgcacagaaagatcgctctcatcgacggtcagactcatcatcaggctggaggtgatgaccgtcatttccctgatgcgagcagcctgttcggcagataactgcaaagtacgatcaggttctgtggtttcggtggtagaaaagcgcaaaacatcgctgctttccgtcaaccgccagtatggattgtgcgatccgagaaagttgtacaacgttgtggactccctaacggttttcatgatgcatatcctccggttaactgcggagtccgcggttaaataaaaggaacaacatgacttacatgaaattaacggcggctaaacgcattgtttttttatatatatttatttgtaatccagttttggaaaaacgccagttttcaaacgaaagtcagttaaaaaatctgcctggatataacgaaggtagagcggggaaataaacggcccatccatgaggaatgggccgtgaaaggagattacgcgaccgggcgcgcaataatgctgcgggtttccatgcggacttcggcaatggtgacgtcaataacgtcagttactttgtaaaccgtttcacctttaatttgtacagtgccgttttcctggctgcaaaccagttcatcgcgcacagcgtgtaagaaaggtgccggaataaaggcgatagcgccgttatcaaccaaacgcacacgcatgccgccacggctgatatcgacaatttccgccgcgaaacgggtgtcggtcccggctttgtctttcaggaagcgtgcgtataaccagtcgccaacatcacgttctgccatccggttgagacggcgacgctcggccatttggacagtgatttcatcctgtgggcgcgtcgcagtttcgcctttgataaccgctttcagcagacggtggttgatcatgtcgccatatttacggatcggcgaagtccaggtggcgtatgcttccagaccgaggccaaagtgaggaccgggttcagtgctaatttcagcaaatgactggaagcgacgaatgcggctgtcgaggaaaccagttggttgcgcatccagttcacgacgcagtttgcagaaaccgtccagcgtgagcacttcttcggcatcgacatgcagaccgtgcgttttcagcaacgctgccagcgcgtcggcattcgccggatcaaagcccatatgcacgttatagatgccaaaaccgagcttatcgcgcagtacgcgggccgcacaaatgttagcggcaatcatcgcttcttcgacgatacggttggcaatgcgacgaggctcggcgacgatatccagcacttcacctttttcaccgagaataaagcggtaatccgggcgatctttaaacaccagtgcgtggttatgacgccactcgccgcggcgttggcaaatttgcgctagcaaacggacttgttcggcaattgcttcactttcaggctgccagtcaccggtattttccagccagtcagaaacctggtcatacaccagctttgctttggattcgatggtggcggcaaagaattcgatattatcttcaatggtgccatcagcggagagcgtcatgcggcatgccagtaccgggcggacttcattggcgcgcagtgagcagagatcgtcagaaagctcgcgaggcagcatagggatgttgaagccaggcagatagttggtgaatgcgcgaattttcgcggctttgtccagcttgctgccttcagcaatccacgcggttggatcggcaatcgccacaatcagctgaagtttgtcatccggcaacgccttagcgaaaagggcgtcatccatatcttctgtgctggcactgtcgatggtgacaaaatccagcgcggtcagatcttcacgaaccagaccttcatcgagcatttcggtagcgacgccgtctggtgcttctttttccagattatggcgcgcaagggtaacccaccacggtacaaagtggtcgtcaccaaaagtgatgtattgtgtcagttcagcatagaaagaacgatcgcctttcagcggatgacggcgcatttcggcaaccgcccagtcgccttctttaaactcgtggttcaggccacgggctgcgcggcaaggaatggcgtcttttaagagtggatgatcaggaacgatggccagacggtcatttttgccctgaactttacccacgaaacgagtcaggaacggttcaaccagttcttctggctctgcggattcacgttctttttcactgtggatcaccgcgataattcggtcgccatgcatgacttttttcatctgcggcggcggaatgaaataacttttttgcgcgtcgacttccaggaagccaaagcctttttctgtggcttttaccaccccttcagcgcgtggcgtctgggaatgcagttgctgtttaagctgcgctagcagcgggttgtcctgaaacataattgtctattttggtggccattagagcggctgacagttttacgcgaatctgtctgacgcggcaaggttaatatgtctcacccaacgcgatttttaagcgatttatccagccacacagcccgctccataccagcagattaataatctgcgttgatgatttttcgtgttcgagtaaagggctgaactgggcggcgctaaagcgatcgggtgctcgggtcagccattgtatcgcctgaacggtagcgtgctcaacagaatgacggtcagcccattggttaatttcattttcgcccttgcgcagaagggggctgatttttttatattcatttgatgaatccatacaggcggcaaaacaagcaggactgccatttatccgcgcgcataacaacgccgcaagcttattatccggctgtgtattaacccgtgtactgtttaacaacctttcgagaagggaaagtgaaatagggtggagagagagtgtttcggccagttggcaaagttctgctgttgaactttttgtgtactcttcaggtagtttttccacctcatagctgcttcgccagcgtattgattcatcagcaaacagtgacgcgtcggcgtagttttgtatttccagaccgggtaaccagcgtaccgggtgcccgagataagcctgaaatgtcgcaatggtccgcgcctgaaagccaataaaaccaatgatttggttaatgatcacacagtccccggcagtaagaccgacgtcattcagatgctggcgcgatcggttgtcgataatagaaggcgagctagccagttggcgggcatattgcgtgatttgtgccaacctatgattgctttccctggaggaatcaggcccggggagcggcgtaagtcgcgccgaatagtagttacataaccgctggacgccgcaaacctgagcaaccgtcagggccgtagacaagcgttcataagcggtgaaggtctgtgaacgggtcacggtaagctggtcagggaacaattccactgcaagaacgcgcgcagggactagccatgaaaggaagggagccagcgtttcttcatcaaggatcacgtcgagcagaaagggatcgctgacctttgcggcttccgggaccagaggcagaacgtcatactccgcagtactggattgcgtttcatgataccagtggcttttgccggtgatgtggcgttgttccatgggcgctccttggtcgtaaaggaaatcgttatcctgacgcaaggcgggaaggggagaaagacggatcggcgataacaaatatcagaaaggtataacagagataacgggcggcagaacgccgcccaatatttaccaacagaatgattatttcaattcgagttcgttcattgcagcgatgctgaaaccgccgtcaacgtggaccacttcaccggagataccggcagagagatcggagcacaggaatgccgcggagttacccacatcttcaatagtaacggtacggcgaatcggggtaacggcttcgcaatgagccagcattttgcggaagtctttgataccggaggccgccagagtacggatcggaccagcagagatggcgttaacacgcacaccttccggacccatcgcgttcgccatatagcgcacgttcgcttccagagacgcttttgccagacccataacgttgtagttcgggatagcgcgctcagcgccaaggtaggaaagggtcagcagggcagaacccggattcagcatggagcggcaagcttttgccattgcaacgaagctgtaggagctgatgtcgtgggcaattttgaagccttcacgggtaacggcgttaacatagtcaccatccagctgatcgccaggtgcaaaaccaatagagtgtacgaaaccgtcaaatttcggccaaactttccccagttcagcgaacatggtgtcgatgctggcatcttctgcaacatcgcactgcagaacgatgtcagaacccaattgagcggcaaattcttctacgcggcctttcagtttgtcgttctggtaggtgaatgccagttcagctccttcgcggtgcatcgcctgagcgataccgtaggcgatggatagtttgctggcaacaccggttaccagaatgcgcttaccggaaagaaaacccatagctttaatccttattgttgatgcttgttgtgcctgaaaatcaggcgattcgtcgttttagtaaacagtacgaacagataaacggttattataatcaacctggctgtgagtggctatagctgccaggtccgaccggagcagggtgcgggcagggtgggcgcttttccccacaccctaatcctctccccagaggggcgaggggaccatattgtgcaaatattgtcaccccagcaacaaacaggcttatacagccccctaaccctttcagggcgatggctgggacggttcagaccttgccgaatattctccagcactgtctccatgttttcaccacaacagctattcggctcggtcggccccctcgccctttcagggtgagggtgaccggcggttcagttcctgcagaataatctccagcaccgcctcctcattacaatcaatctcgttatgccagaaacgcagcacggtccagctctgcgactcaagccagctagtgcgcctggtatcataggcaactgccaaatcatgctgcccaccatccagctcaacgactacgcgcgccgagcagcaagcaaaatcgagaatgtagctccccaccggatgttgacggcgaaatttgaaatcaccaaaacgtcggctgcgaagatatcgccagagctttcgttcctgcaaagtgagattgcgtcttaaatcacgcgcatttgattttattttatccatcacctcattctgacaagatttaatctcttgtcagaatgaggtggataatctggaaggaggattcagaaaattagcgatctttacgccacgcatccgctgtcaatgcttcgccaaagtgcccggcaatcagccgtttggtgagttcatgcagcggcgatgccagcacatccgcggtgctgcctcgctcgacaacctcgccctgatgcatcaccagcacctggtcgctaatgtgcttcatcattccgatatgctgggtaacataaatatacgaaatgccctgtttttcctgtaattccagcatcagattaatcaactgcgaacgcatcgacatatccagtgaagcgagggcttcatcggcaataatgacttttgggcgcaatatcagcgcgcgcgccagacccagacgctgtttttgcccgggggccaacatatgcggatagtaactgacgtgatccggtagcagcccaaccatacgcatcgtttcaataatctgtttgcgacgctgttccggttccaggttggtgttcaggcgcagtggaaaatccagaatttgcgagatacgttgacggggattcaacgaggtcgaaggatcctgaaaaatcatgcgaatacgctgactgcggaaggaataatcgccaaaatgcagtggatgatcgtcaatcaataactcgccgctggtaggttctatcattcccgccagcatttttgccagcgtggatttacccgaaccattctcgccaataatcgccagtgtctggccttcacgtagcgtaaagctcaagggttttaccgcttctacggtctgacgacgaaaccaaccggtccggtagcggaacgttttacttaaattacgcacttcaagcagcgtttcgatcatctcactctttctccatgttcagcgggaaatgacaggcatagagatgatttttcgcccccgtcaaacgtggcgtcacaatgcattctcgttgtgcgtacgggcaacgcggccccagacgacaaccaatcggtaactgttccagcagtgggatagcgccgggcagcgtattgaggcgacttttatgcggcatcgcgctaccgaagtctggtatcgcccggatcagcgcctgggtataaggatgatgtggcattgtcaccaactccttacttggcgcggtttccaccgtttgaccgcagtaaagcacgttaattttatccgcccattggctaagcatttgtaagtcatggctgataagcaaaatagtggtattgctgttttggttgagacgcgtcaacaggcgaaagatttgcgcctgggttgttggctccattgagttggtcggttcgtcagcaattagcagacgcggttgattcgccagtgcaatggctatcatcactttttgacattcaccttcggttaactcatagggaaaactgcgcatagcatctttgtgatctttaatccccacgcggtgcagtagttcgatggcacggcgtttgcgccagccaaaacgctgccaccaacggcctttataggtccaggctgggatgttttgcatcaactggcgacccacacgttctgaagggtcaagacacgactgcggttcctggaaaatcatcgacacgttatggccaaccagtttgcgccgttcgcgtgcggagagacgcagcaaatcgatatcatcaaaacgcatacggtcagcagtaacacgccagttatctttattcaccccacaaatcgctttcgcaatcaaactcttgccggaaccggattcaccaacaagaccgcggatttcaccttcggttaaggtcatacttacccggtcaacggctttaacccactcatccccggttttaaattcaatagtcaggttacgaatatcgagtaatggcattattccacccccgcaataatcgcacgacgaacgccatcgccaaggaggttaaccaacagcacgctaatcataattgccgcacctggcagcatgacagtccacggggcgacataaatcagttccagcgcatcaccgagcatcgctccccattcaggcgaggggagttgtgcgccgagatcgagaaagcccagcgcggcgatatcgagaattgccatcgacagtgcgcgggtgatctccgtgaccagcccggcggtgatgttaggcatcacagcaaaccagagaatattcagcgttgatgcgccatccagacgggcggcgataacgtactctttttccagttcgtcatgcaccatgctgtaaatcgaacgtaccatacgcggcagcagcgccagccagacggcaaacatggcgtgagacaaactcggtccggcaaacgctacaacgataattgccagcagcagcgaagggatcgccagtaaggtatccagaatatggttaagcaccgctgagcggaggccgtgcgtcgccccggcgaaggtgcccagtaccaggccacagatcgtcgcggcaagcgtcaccacaaatgcgccacccacggttggcgcagctccgctcagtaaacgacttaaaacatcgcgtccgaggtcgtcagtccccaggaagaaagaaacttcgccatagcgcgaccatgacggcggcaataattggtaaccgagaaattgctggtcgatgccgtaaggcgcaaaccagccgccaaaaatacacagtacagccagccccgcgcagccgtacaggccgaccatcgcagaggcgtcactataaaatttgcgccaggcggtacgcagcgtgcccggcgggcgcttttcgctgtatacgctatcgtaaggcataccattccttatgtttcagagggttagccatggcacccaaaatatcagaaatcacgttaacaataatgaccagtgagccacacaccatcactccggcggaaatggctgcgtaatcctgctggcggatggcgttaattaaccagcgccctaaacccggccagctaaaaaccatttcggtgatcatcgccagcgtcagcatggtggaaaactgtaagcccaggcgaggaataaccggcggtaacgcgttatgcagaacgtggcgacgcaaaatagtaaagcgcgacaaaccgcgggtcgccgccgcttttacatagttctggtcatacacttcgatagtgctgatacgcatcaggcggatcacttcagttgttggcgcaaccgacagggtgatcacgggcaatatcatatggcggattgcgctcatgatcatttcatcccgccatggtgagtccgaaagccaggcatcaatcaacgcaaaaccggtaatcggtttcacttcgtagagcagatcgaaacgccctgaaacgggcaaccaacctagcgtgagtgaacaaaacagcgtcaacagaagcgccagccagaacaccgggattgaaaagcccagcaaggcgatggcgttgatcaagttatcctgccacttatggcgcgtaatcccggcaatcatccccacggggatgccaacaatcagcgcaaaaccgaaggcgaggatgcacagttccatcgtcgccgggaagacctcttttaactgttcggcaattggttgaccgttaatgctggaaacaccaaaatcccagtggatcaggccattaaaccagaacacccaggcattccacagtgacgcgccttgtaacggcgcgtgtggagtgaaatagctcaaactgaagccaacgaaggtcagcaggaacaaggtaacaatcaataacaaaatgcggcgtaaggtgaagataatcatggctttttcacctcatcctgtttctcgcgatacaccccagcaaaggaggcgttaccaaacgggctaagtaccagacctttgatatcgtaccgataggcctgcaaacgcaatgacgacgccagcggcaaaatgggcaattcctgcgccagaatactttgcgcttcgtcataggcttcaatacgcgccgccagctgctgcgaagagagcgccttacgcaatacgctgtcgaatttcggatcgcaccagtgggcgaggttggtctgcgaatgaattgccgcgcagctcagtaacggacggaagaaactgtccgggtcgttactgtccgtcgcccaaccggataacgtcagatcatggctcatatccatcaaccgcgcctcctgaaagcgaccttctaccggcacaatcaccacttttacgccaacctgcgccatatccgcctgaatcagttcggcagttttcagtggactggggttccacgcctgcgaacgtgtgggcacccacagtttcagcgttaaattttccagccccaacgacttcaactgttcgcgcgatttcgccggattgtattcagtaattttagcctcgttgtcataggcccacgaggcgcgcggtaaaatagaggccgccgtttcagccgtaccataatagatggattgcatcaggcgctggttattaatcgccagtgccagcgcatggcggacagcgggattatttagcggcggtttggcggtgttaaatgccagataggcgacgttcatcccaggacgcagcgttaaacgcaagcgcgggtcgtcacgcaaaatggatagctggctggcagcaggccaggccagaacgtcgcattccccggtcaggagtttcgacaaacgtccggtgccgccggagcctaaatccaccactacctgcggcattaacggtttaccgcgccagaagtcatcatgacgttgtaggcgaataaattgcccggcgcggtattccgacaactgatacggaccggtgccgaccggttgacggtcgagttgctcctggcgatcttctttctctaacttccgggcatattctgccgacatgaccgaagcataatgggttgcgaggtgccacaaaaaagaagcatccggctgggcgagtcggaactcaacggtatgattatccagtttgcggacgcttttcacgttatcggcaaattgcaggctgtcgaagtaggggaagttgctgccgttgacgttatgccacgggttgttgcggtcaaaaattcgctggaaggtaaacaccacatcgtcggcattcattttacgagtgggagtaaaccagtcggttttttgaaacggaacatcgcgacgcaggtggaagcgataggtcgcgccgttgtcgagtacttcccagctttcggcaagttccggcatcaggcgataggtatagggatcgacatccagcagtcgatcataaaactgggcggcaagggtatcgacaattaacccactgctcgctttggatgggttaaaggtgttgacttgcccgctgacgcaatagacaaaaccgctgtcgcggatatcagcatgcgggggagattcaggcgcggcgattgcctgaccactcacaagtccagcaatcaccaaaagagacgataatacctggcgcataatattaagggattttatgtaaagaggctatcttactaatatttaatgacatttgccattaccgtttgtgttcaggggtcgtaatgagggccgtgtggttggtcgttgaacagatggcgtcgccatctgttcaacattcgtacccgtgatttctctataactataactcacagaacaacttagcgaggagcagagcggtacgatcgtgagaaacccattaaagcacgctgcaatgcgtgtcattttaaccggatgcagagtgaacgctttatccggacaacgatactgaccgatcgtctgcaattaaataattactcattaccccattgattcaaaaactctgcgatctcatcaatgcgtacgggattaatccccgcttcagcagccatttcatgttgggcttcttcgctgatctcttcattgttcatcaaacgggtgagcagtaactggaagtagtgggccagcggtgtgcgttcagcgtctgcgacaggctctgcgcattcggtcgcgtactcatcggcaatatcaaaatattttagcgggatatcgtggttcattatttgcccctggggttaatgcgctaagcataagggcggatgatagcactcgtgatccgggtcatacatctttttatagttaatggcgcggcgcgttaccctcaggcaggataatgcgccgcgcatccgactattacgtttcactcaccggcgttctgtcaccatcatacaacggcactttgcgatagcggcggatcagataccataaatatgcgccgcctaacgaagcccataccagaccgagtgtcagtgacgttgactcgaggttaacccacagcacacccaccgtcagcgcgccaaccagcggcatcagcaaatagtggaagtgatccttccagcttttattcattcctttacgccgccagaaatgattaaacaccgacagattcacgaaggtaaacgccaccagagcaccgaagttaattaacgctgtggcggtaactaaatcgaagaacagcgccgacaacgcgacaatcccgaccataatgacgttgagtgccggagtccgccattttgggtgcacatagccaaacacgcgctccggaaacacattgtcacgccccatcacatacagcagacgcgacacgctggcatgtgaagccaggccagaggctaacgtgttcacaaacgtggtgcagaggaaaatcgactggaagagcttgccgccgacgtacagcgcaatttcaggcagtgcggcgtccgggtctttaaagcggctgatatcgggaaagaacagctgcataaagaacgacgccgcgataaagataacgccgccgtataccgccgtcaggaagatggctttcgggatcacgcgtgcggcgtccggcgtctcttccgaaagcgtggtcaccgcatcgaaaccgaggaacgagaaacagacaatcgtcgccccggtaataatcgggatcaggtgcgcgttctcgctgataaacggctgaagtgaccagacggtgccaacgccttctcctttatgcagtccctgaactaccaggaagataaacaccaccatgatggagatttgcaccagtacaaacagggtattgaagttagcgaccaggttgacgctcttcagattcgcggcggttaaaatggcgacgaaggttaccacccacacccacggcggcacttccgggaagagggcggagagatagattttcgccaacaaaacgttgatcattggcaaaaagagataatccagcagtgatgaccagccgaccataaatccgacgtgcggattaatcgacttttgcgcgtaggtataggccgaaccggcctccggaaactggcgaaccagtttgccgtagctgatagcggtaaacagcacgcccgccagcgccagcaaataggacgccggaacgtgaccgtcgctaatgccggagacaataccaaaagtatcaaatacggtcatcggcgtgagataggccagacccatcattaccacctgccacaatttcagtgattttcgcagacgggttttgccgggttgcgcagcaatattcagtggtgaattaatagccataattgctgcctcccctgcgtaataaggtttgcggtcgtgtcaacctgaaatcaaacctgtttagcaagggaagcaaagggggcggagtccagtcagtagcaggaggggcgcatacgcagcctccctcgccatgcggggatttaatcatcggcatcatctcatttcctcgtcacagtcttaatcgttaacggaagcccgttgccgcctgcgctccataacgcgacatccgggaaatgtctggattaccagcaaatgtcaggcctggctccgctcaggccgatgaaacaaccccgcatggggaattacgcgtttttcaacatccactcaatttctgtttctgtgatgaggcgctcaaactgcaacagctcatcatttttacaggcgtgatacacatggcaaaaccgttcgcctaaatagcggcgcaggtgatcattctcgataaactcacccagggcatcgctctggcgaatcgggaagggtaagccttcctgttccagcccgttgccttcgacttcttcctgcaacggcagctcgttatcaaggccatgcaaaataccggcaaaaatcgctgccatcaccagatatgggttggcatcggcacccgccacgcgatattccacgcggtgattatgacggtcgccgcacggaatacgcagggcgacggtgcggttgttatggccccacgacgcctgcgtcggcacatacattcccggctggaagcggcgatacgagttcacgtttggtgccagcaacgccatcgacgacggcatcaggtcaatcatcccggcgagcatctttttcagcagcggcgaatcttcgccttctgtgtcagaaagcacattctcgccacgattattttgcatactgatatggatatgcatcccgctgcccgcgtgctcttcatacggcttcgccataaaagtggcgtgcatcttatgcttttctgccatcagacgcaccaggcgttttagcgccagcgcatcatcgcaggcttccagcacgttatcggtatggtaaaggttgatttcaaactgacccggcgaggcttcggcgaccgcaccgtcggcgggaattaactgtaactgcgccagttcatcaatatcattgagcacgtcggcgaagtggttgaggttatcaacggagtaaacctggctttgtgtattgcggtcatcggtgccgggcgcgcagggcggttgcagatacccttcagcgtcgcgctgacgatccagtaaatagaactccagctctaccgctacaaccgggaacaatccgcgctggcgtagctgctgccacaggcggttaagaacgttccgcggctcaacgtcaaagggagcgccatcttcatcgaccatggtcaggagcatctgaccgataaactctggatcggcggcagaaggggttaaggaaccgagaacaggaacacaagtacgatccggctcgcccatttcctgacccagacccgcttcttctactacgttgcccagaatatccattgcaaacaccgaggccgggaaataacaccctttctccaacttcttcaggcttgaaacagggatacgttttccacggaagcaaccattcaaatcagtaagtaaaacatcaacatattgcgtattcgggtagcgctccaggtagcgtttcacttcctgcgtaaaggcgctaccccgcctctcttctgactgctgaacaaagttctctacttcaacgatattggtttccatgattcttcgcctttggtttgttttccgctcgttatcaaagcgtaaaatataatgaccaccattcgaatctgtatgcaaactaaatgtttgtcaaatgttaaattgagtttgcaaaaatgaaaactcactgctagattgaaaaaatattgaacataaaggtcatttaaagcgcagtaatggcgataatttagtccactttgtgagattgagcatggaaaatataatgaacaatccggttatcggtgtcgtaatgtgcaggaacaggcttaagggtcatgcgacccagactctgcaagaaaagtacctgaatgccatcatccacgcaggcggcttgccaattgcgctaccacatgcgctggcggaaccgtcgttacttgaacaacttttgccgaaactcgatggcatttatcttcctggtagtcccagcaatgtgcagccgcacctatatggtgaaaacggcgatgagcctgacgccgatcccgggcgtgatcttctgagcatggcgataattaatgccgcactcgaaaggcgcattcccattttcgccatctgccggggtttacaagaactagtggtggcaaccggtggttcgttgcatcgcaagctgtgcgaacagcctgaattgctggaacatcgggaagatcccgaactgccggtggaacagcaatatgcaccgtcgcatgaagttcaggttgtagaggggggattactgtctgcgttgttacctgaatgtagcaacttttgggtaaactctctacatggacaaggggcgaaggtcgttagcccacggttgcgtgttgaagctcgctcgccggatggcttagttgaggcggttagcgtcatcaatcatccttttgcgctgggcgtacagtggcacccggaatggaacagtagcgagtacgcgctttcgcgtatattgttcgagggctttatcaccgcttgtcagcaccatatcgctgaaaaacagcgactctgaccactacagtttaaggaaatgcaaatatgagtgatgagggactggcgccaggaaaacgcttgtcggaaatccgccagcagcaggggctttcacaacgtcgtgccgccgaactctccgggctgactcacagtgctatcagtacgatagaacaagataaagtcagccctgccatcagtacgctgcaaaagctgctgaaggtgtatggtctgtcactctcggaattcttttccgagccggaaaaacctgatgagccgcaggtcgtcattaatcaggacgacttaattgagatgggcagtcagggtgtgtcaatgaagctggttcataacggtaacccgaatcgcacgctggcgatgatctttgaaacgtaccagccgggcacaaccactggggaaagaattaagcatcagggtgaggaaataggcactgtactggaaggtgaaattgttctgacgattaatggtcaggattatcatctcgtcgcggggcaaagttatgccattaataccggcatcccgcacagtttcagtaatacgtcggcaggtatttgccgaattatcagcgcccatacgcccaccacgttttaatcttcttgttctgtaagccgggtaagcgcaatgcgcccggcaatctatacacaaaatcattcaagttgcatcaaggcggcaagtgagcgaatcccgatgagcttactcaggtaagtgattcgggggagcaaacgcagccaaggcagaggcggcttgaaggatgaagtgtatataaagaatgtcgccagaaataaacgggcatgcggcccggggatctctgcgccctgacgttcacaaactgcatatatctgatagacgtgaaacaggagtcataatgaattttcatcatctggcttactggcaggataaagcgttaagtctcgccattgaaaaccgcttatttattaacggtgaatatactgctgcggcggaaaatgaaacctttgaaaccgttgatccggtcacccaggcaccgctggcgaaaattgcccgcggcaagagcgtcgatatcgaccgtgcggtgagcgcagcacgcggcgtatttgaacgcggcgactggtcactctcttctccggctaaacgtaaagcggtactgaataaactcgccgatttaatggaagcccacgccgaagagctggcactgctggaaactctcgacaccggcaaaccgattcgtcacagtctgcgtgatgatattcccggcgcggcgcgcgccattcgctggtacgccgaagcgatcgacaaagtgtatggcgaagtggcgaccaccagtagccatgagctggcgatgatcgtgcgtgaaccggtcggcgtgattgccgccatcgtaccgtggaactttccgctgctgctgacctgctggaagcttggcccggcgctggcagcagggaacagcgttgtcctgaaaccgtctgaaaaatcaccgctcagtgcgattcgtctcgcggggctggcgaaagaagcaggcttgccggatggtgttttgaacgtggtgacaggttttggtcatgaagcggggcaggcgctgtcgcgtcataacgatatcgacgccattgcctttaccggttcgacccgtaccgggaaacagctgctgaaagatgcgggcgagagcaacatgaaacgcgtctggctggaagcgggcggcaaaagcgccaacatcgttttcgccgattgtccggatctgcaaaaagcggcaagcgccaccgccgcaggcatcttctacaaccagggccaggtgtgcatcgccggaacgcgtttgttactggaagagagcatcgccgatgaattcttagccctgttaaaacagcaggcgcaaaactggcagccgggccatccacttgatcccgcaaccaccatgggcaccttaatcgacagcgctcacgctgactcggtccatagctttattcgggaaggcgaaagcaaagggcaactgctgctggatggtcgtaacgctgagctggctgccgccatcggcccgaccatctttgtggatgtagacccgaatgcgtccttaagccgcgaagagattttcggtccggtgctggtggtcacgcgtttcacatcagaagaccaggcgctacagcttgccaacgacagccagtacggccttggcgcggcggtatggacgcgcgacctctcccgcgcgcaccgcatgagccgccgcctgaaggctggttccgtcttcgtcaataactacaacgacggcgatatgaccgtgccgtttggcggctataagcagagcggcaacggtcgcgacaaatccctgcatgcccttgaaaaattcaccgaactgaaaaccatctggataagcctggaggcctgaaatgaccgaacataccagcagttactacgccgccagtgcgaataaatacgcgccattcgacacgctgaatgagtcgatttcctgcgacgtttgcgtggtcggcggcggctataccgggctctcttccgcgctgcatctggcggaagcgggctttgacgtagtggttctcgaagcctcacgcatcggctttggcgcaagcgggcgcaatggcgggcagcttgtgaactcctacagccgcgacatcgacgtgatcgaaaaaagctacggcatggacaccgcccgtatgctcggcagcatgatgttcgaaggtggtgagatcatccgcgaacgtatcaaacgttatcagattgactgcgactaccgccccggcggcctgtttgtggcgatgaatgataaacagctcgccacacttgaagagcagaaagagaactgggaacgctacggcaataaacagctggaattgctggacgccaacgccattcgccgtgaagtagccagcgatcgctataccggtgcgctgctggatcacagcggtgggcatattcatccgctaaacctcgccattggcgaagcggacgccatccgcctcaacggcgggcgcgtgtatgaactttctgccgtgacgcagatccagcacaccacgccagcggtggtgcgcactgccaaaggtcaggtgacggcgaagtatgtgattgtcgccgggaatgcgtatctgggcgataaagtagagccggaactggcgaaacgcagcatgccgtgcggcacgcaggtgatcaccaccgaacggctgtcggaagatttagcccgttcgctgatcccgaaaaactactgtgtggaagactgtaattatctgcttgattactaccgtcttaccgccgacaaccgtttgctgtacggcggcggcgtggtctacggcgcgcgcgacccggatgacgttgagcgtcttgtggtgccgaaactgctgaaaaccttcccgcaactgaagggcgtcaaaatcgactaccgctggacgggcaacttcctgctgaccctttcacggatgccgcagttcggtcgcctcgataccaacatctattacatgcagggctacagcggccacggcgtcacctgtacccatcttgccgggcgtctgattgccgaactgctgcgcggcgacgccgaacgtttcgatgccttcgccaatctgccgcattacccgttccccggcgggcgcacgctgcgagtaccgtttaccgcgatgggcgcagcctattacagcctgcgcgatcgtctgggcgtttaatttccgattaacagtgaagagtcaaaaggtgtgaaacatgagcaacaatgaattccatcagcgtcgtctttctgctaccccacgcggggttggcgtgatgtgtaacttcttcgcccagtcggctgaaaacgccacgctgaaggatgttgagggcaacgagtacatcgatttcgccgcaggcattgcggtgctaaataccggccaccgccaccctgaactggtcgcggcggtagagcagcaactgcaacagtttacccacaccgcgtatcagattgtgccgtatgaaagctacgtcaccctggcggagaaaatcaacgcccttgccccggtgagcgggcaggccaaaaccgcgttcttcactaccggcgcggaagcggtggaaaacgcggtgaaaattgctcgcgcccataccggacgccctggcgtgattgcgtttagcggcggcttccacggtcgtacgtatatgactatggcgttaactggaaaggtcgctccgtacaaaatcggcttcggcccgttccctggttcggtgtatcacgtaccttatccgtcagatttacacggcatttcaacacaggactccctcgacgccatcgaacgcttgtttaaatcagacatcgaagcgaagcaggtggcggcgattattttcgaaccggtgcagggcgagggcggtttcaacgttgcgccaaaagagctggttgccgccattcgccgcctgtgcgacgagcacggcattgtgatgattgccgatgaagtgcaaagcggctttgcgcgtaccggtaagctgtttgccatggatcattacgtcgataagccggatttaatgacgatggcgaaaagcctcgcgggcgggatgccgctttcgggcgtggtcggtaacgcgaatattatggacgcgcccgcgccgggcgggttgggtggcacctacgccgggaacccgctggcggtggctgccgcgcacgcggtgctcaatattatcgacaaagaatcactctgcgaacgcgcgaatcaactgggccagcgtctcaaaaacacgttgattgatgccaaagaaagcgttccggccattgctgcggtacgcggcctggggtcgatgattgcggcagagtttaacgatccgcaaacgggcaagccgtcagcggcgattgcacagaaaatccagcaacgcgcgctggcgcaggggctgctcctgctgacctgtggcgcatacggcaacgtgattcgcttcctgtatccgctgaccatcccggatgtgcaattcgatgcggcaatgaaaattttgcaggatgcgctgagcgattaatagcccaacgcaataatgtctgatgcgctgcgcttatcaggcctgcaaacgacgtattgattatgtatgccgaataaagcattcacgccgcatcctgcaagttgtattgctcaacttcgctaaatctggtgctttttcaacaacgcgcggaactgatgataagttaaccccagtaattcagccgcgcgcttctggttatatttcccttgttgcaaactgagttgcagcaactctttttcctgctgcatctgaaactcacgtaaatccagcggcagtgttggaagcgaggtggtttctgaaacggcgatagcgtcttcaggcggacgccgtttaaagggatcaataatgatgtcatcaagcggataatcgctggtgccgtggcgatacactgaacgttccaccacgtttttcaattcacgaatatttcccggccaacgataattcagcaatgtttctctggcgcgctccgtaaaccccgggaacagaggcagcttgatttcccgacacatctggatggcaaagtgttctgccatcaacattatgtcgctttcgcgctcgcgcagtggtggcagttgtacaacatcaaaagccagtcggtcgagcaggtcagcgcgaaaagtgccttcattgaccatcgccgggagatcggcattcgtcgcgcataccaaccgcacattcacctgcaatggctggctgccgccaacgcgctccagttcaccgtactcaatcacgcgcaataatttctcctgcaccatcatcggtgccgtagcgagttcatcaagaaatagcgtaccgccgtcggcacgttcaaatctcccaggatgacgtttttgcgcaccggtaaacgcccccgcttcgtgaccaaacagttcggaatccagcagattttcatttaacgccgcgcagttaagggaaataaacggcccttgccaacgggaggagagataatgcaggcggctggcaatcagctctttaccggtgccgcgttcgccgatgatgagcaccggtttgtccagcggtgcgagatgcgaaacctgttccagcacttcgagaaagctgttcgcctcaccaagtaaattatctttgtattctgccatgatgaaattcgccacttgttagtgtaattcgctaactcatcctggcatgttgctgttgattcttcaatcagatctttataaatcaaaaagataaaaaattggcacgcaaattgtattaacagttcagcaggacaatcctgaacgcagaaatcaagaggacaacattatgggtattttttctcgctttgccgacatcgtgaatgccaacatcaacgctctgttagagaaagcggaagatccacagaaactggttcgtctgatgatccaggagatggaagatacactggttgaagtacgttctacttcggcgcgcgcgttggcagaaaagaaacagctgactcgccgtattgaacaagcgtcggcgcgtgaagttgaatggcaggaaaaagccgaactggcgctgctgaaagagagagaggatctggcacgtgcagcgttaattgaaaaacagaaactgaccgatctgattaagagcctggaacatgaagtgacgctggtggacgacacgctggcacgcatgaagaaagagatcggtgagctggaaaacaaattgagcgaaacacgcgctcgccagcaggcattgatgttacgtcatcaggcggcaaactcgtcgcgcgatgtgcgtcgtcagctggacagtggcaaactggatgaagcaatggctcgtttcgaatctttcgaacgtcgtattgaccagatggaagcggaagcagaaagccacagcttcggtaaacaaaaatcgctggacgatcagtttgccgaactgaaagccgatgatgcaatcagcgaacaactggcacaattaaaagccaaaatgaagcaagacaatcaataataacatccaggcggcgtccgaacgcgccgccgctcatcgtctaaggagtacttatgagcgcgctatttctggctattccgttaaccatttttgtgctgtttgttttaccgatctggttatggctgcattacagcaatcgttctggtcgcagtgaattgtcgcaaagtgagcagcagcgattagcgcaactggctgatgaagcaaaacggatgcgcgaacgtattcaggcgctggaatctattcttgatgcagaacatccgaactggagggatcgctaatggcgggcattaatctcaataaaaaattatggcgtattccacagcagggcatggtccgcggcgtctgcgccgggattgccaactattttgatgtaccggcaaaactggtgcgtatcctggtggtgctgtcgattttcttcggtctggcgctgtttaccctggttgcttacatcattttgtcatttgcgcttgatccaatgccggacaacatggcctttggtgagcagctaccttccagcagcgaattgctggatgaagtcgaccgtgaactggcggcaagtgaaacgcgtttacgcgagatggaacgttatgtcacttccgatactttcacgttacgtagccgtttccgtcaactgtgaggaaagttatgaatactcgctggcaacaggccgggcaaaaggtaaagcctggtttcaaattagcaggcaagctggtacttcttaccgcactgcgctatggcccggcgggtgtggcgggctgggcgataaaatcagttgctcgccgaccgctgaaaatgttgctggctgtggcgctggaaccgctgttaagtcgggctgctaataaactggcacagcgttataaaaggtgaggggagtttcgcaaaaattgttaaatctcaggcgtataatggatggcaattttcatccatagaaggacgcttacatgtttaaaaaaggcttacttgctctggcactggtgttttcactgcccgttttcgccgctgaacactggatcgatgttcgtgttccagagcagtatcagcaagagcacgttcagggggccatcaatattcccctgaaggaagtgaaagagcgcattgccaccgccgttccggataaaaacgacaccgtgaaagtgtattgcaatgccggacgccagtcagggcaagcaaaagagatccttagcgagatgggatatacccacgttgagaacgccggtggcctgaaagacatcgcaatgccgaaggtcaaaggttaaaagaattcaccatgagcggcgcttatgcgccgtttttttttctgtcacaccttatttacatccccatagattatttgcgtcagctcacaaatacgctttttccctggtaaaaaatgatttcctgcgtgactaaaacccttgtgctcaattgacagtttattttctgcggagtagtctctcgtttcatgggaccgctaccacggaaaggcaacatgaaacagaaaattacggattacctggacgaaatctacggtggaacatttaccgcaactcatttacagaaacttgtaacgcgtcttgagagtgcgaaacgattaattacacagcgacgtaaaaaacactgggatgaaagtgatgtcgtgttaattacctatgccgatcaatttcacagcaatgatttaaaaccattacccacatttaatcagttttaccatcaatggctgcaaagcattttttcacatgttcatttgttgccgttttatccatggtcatctgatgatggcttttcggtaattgattatcatcaggtcgccagtgaagcgggggagtggcaggatattcagcaactcggtgaatgcagtcatttaatgtttgattttgtctgcaaccatatgtcggcaaaaagtgaatggtttaaaaactatttacaacagcatccaggttttgaagatttttttattgccgttgacccgcaaaccgatctcagcgccgtcactcgcccgcgtgcgttaccgttattaacgccattccagatgcgcgatcattcaacgcgccatttatggaccacctttagtgacgatcaaattgacctgaattaccgtagccctgaagtgttgctggcgatggtggatgttttactctgttaccttgcgaaaggtgctgagtatgtccgcctggatgccgttggctttatgtggaaagagccgggaacaagctgcatccatctggaaaaaacacatctgattatcaaactgttacggtcgattattgataacgttgcgccaggtacagtgatcattaccgagaccaatgttccgcataaagacaacattgcttactttggcgcaggcgatgacgaagcacatatggtgtaccagttctcgctgccgccactggtgctgcatgcggtgcaaaaacagaacgttgaggcgctttgtgcgtgggcgcaaaacctgacactaccttccagcaacaccacctggtttaacttcctcgcctctcacgatggcatcgggctaaacccgctacggggcttgttgcctgaaagcgaaatattagagctggtcgaggcgttacagcaggaaggtgcattagtaaactggaaaaataatcccgacggtacacgcagtccgtatgaaataaatgtgacctatatggatgcgttaagccgccgtgagagtagcgatgaagaacgttgcgccaggtttattctcgcccatgcgattttgttaagtttccccggtgtgccagcgatatatattcaaagtattcttggctcgcgtaatgattacgcaggtgtcgaaaaactcggatataaccgtgcgattaaccgtaaaaaatatcacagtaaagagataacccgagaactgaacgatgaagctacattaaggcatgcggtatatcatgagttgtcgcgtttaattacacttcgtcgcagccataacgagtttcatccggataataattttaccattgatacgattaattcatccgtaatgcgtattcaaagaagtaacgctgatggtaattgtctgactggattgtttaatgtcagtaaaaatattcagcatgtaaatattactaatctgcatggtcgggatctgattagtgaagttgatatattgggtaatgaaataacgctgcgcccctggcaggttatgtggattaaataaaaaggaacatctcatgattaaatcaaaaatcgtgctgttatcagcactggtttcctgcgccctgatttcaggctgtaaagaagaaaataaaacgaatgtatccatcgaatttatgcattcttcggtggagcaggagcgccaggccgttatcagtaaattgattgcccgttttgaaaaagaaaaccctggcatcaccgttaagcaagtgcccgtggaagaagatgcctataacactaaagtcattactctttcacgtagcggttcgctgccggaagtgatcgaaaccagccatgactacgccaaagtgatggacaaagagcagcttattgatcgcaaagcggttgccacagtcatcagcaacgttggtgaaggcgcgttttacgatggcgtactgcgtattgtgcgtaccgaagatggtagcgcatggaccggtgttcctgtcagcgcctggattggcggtatctggtatcgcaaagatgtgctggcaaaagcggggcttgaggagccgaaaaactggcaacagctgctggacgttgcacagaaactgaatgacccggcgaataaaaaatacggcattgcgctgcctacagcagaaagcgtgttgacggaacaatccttctcccagtttgcgttatccaaccaggctaacgtctttaacgccgaaggcaaaatcacccttgatacaccagagatgatgcaggcactgacctattaccgcgaccttgctgccaacactatgccgggttctaacgacatcatggaagtgaaagacgcctttatgaacggcaccgcgccgatggcgatttactccacctatatccttccggctgtgattaaagaaggcgacccgaaaaacgtcggtttcgtggtgccaaccgagaaaaactctgcggtctacggcatgttgacctcgctgaccattaccgccgggcaaaagaccgaagagacggaagcagctgaaaaatttgtcacctttatggagcaggcagacaacattgccgactgggtgatgatgtcgccaggtgctgcgctgccggtgaataaagcggttgtcactaccgccacctggaaagacaacgacgttattaaggcgctgggtgaactaccgaatcagctaatcggtgaactgccaaatattcaggtctttggtgcagtaggggataaaaactttacccgcatgggtgatgtgacgggttctggcgtggtgagctccatggtgcataacgtcaccgtgggtaaagccgatctccctggcacgctgcaagcgagccagaaaaagctggatgaactgatcgaacagcactaaacccaggacaggaatccgcaatgaacaggcttttttcaggtcgttccgatatgccctttgcgctgctgcttctcgcgcccagcttattactgctgggtggtctggtggcctggccaatggtgtcgaatatcgaaatcagttttttacgtctgccgctcaatcccaacatcgagtcaacctttgttggggtgagtaactatgtgcgtatcctctccgatcccggcttctggcactcgctgtggatgacggtctggtataccgcgctggtggtggcgggcagcaccgtgctcgggctggcagtggcgatgtttttcaaccgcgagttccgcctgcgcaaaaccgcgcgttcgctggtgatcctctcctacgtaacgccgtccatttcgctggtgtttgcctggaaatacatgttcaacaacggctacggcattgtgaactacctcgcgtcgatcttctgcatctctatgagcaggcaccgctgtggttcgataatccgggcagtagctttgtgctggtggtgctgttcgccatctggcgctacttcccgtatgcctttatctcgtttctggcgattttgcagaccatcgacaaatcgctgtacgaagcggcagagatggatggcgctaatgcctggcaacggtttcgtatcgtcacgctgcccgcgattatgccggtcctggcgacggtggtgaccctgcgcaccatctggatgttctacatgttcgcggatgtttatttgctgacgaccaaggtcgatattctcggtgtatatctctacaaaaccgcctttgcctttaatgatttaggaaaagcggcggcgatctcggtggtgctcttcatcattattttcgctgtcattctgctgaccaggaaacgggtgaacctcaatggcaacaaataaacgcacactcagtcgcatcggtttttactgcgggctggcgctgtttctcatcatcacgctgtttccattttttgtgatgctgatgacctcgttcaagggcgcgaaagaggcgatctcactgcatcctacgctgctgccgcagcagtggacgctggagcattacgtcgacatttttaacccgatgattttcccgtttgtcgactacttccgtaacagtctggtggtgtctgtggtttcatccgtggtggcggtattcctcggcattcttggggcttacgcgctttcccgcctgcgctttaaaggtcggatgaccatcaacgccagcttttacacggtgtatatgttctctggcattttgctggtggtgccgctgttcaaaatcatcaccgcgctgggcatttacgacactgagatggcgctgatcatcaccatggtgacgcaaactctgcccaccgccgtgtttatgctgaaaagctacttcgacaccatccccgatgagatcgaagaagcggcgatgatggatggcctcaaccgtctgcaaattatcttccgcatcaccgtgccgttggcgatgtccgggctgatatccgtgttcgtctactgctttatggtggcgtggaacgactatctgtttgcgtcgatcttcctctccagcgccagcaatttcaccttaccggtgggcctgaacgcgctgttcagtacgccagattacatctggggacggatgatggcggcctcactggtgaccgcattgccggtggtgattatgtatgcgctttcggaacgttttattaagagtggtttgaccgccggtggcgtgaagggctaaagcggccagtttctttacaaggagttttaaatgaaaaagttagtagccacagcaccgcgtgttgctgcgctggttgagtatgaagatcgggcgattttagccaatgaagtgaaaatccgcgtgcgtttcggcgcaccgaaacacggaacggaagtggtcgacttccgcgccgccagcccgtttatcgatgaagactttaacggcgaatggcagatgttcactccgcgtccggcagatgcgccgcgcggcattgagtttggcaaattccagcttggcaacatggtggttggcgacattatcgagtgcggcagcgacgttaccgactacgcggtgggcgacagcgtatgcggctacggcccgctctccgagacggtcatcattaacgcggtgaataactacaagctgcgcaaaatgccgcaaggcagctcgtggaaaaacgccgtttgttacgacccggcgcagtttgccatgagcggcgtgcgcgatgccaacgtgcgcgtgggtgattttgtggtggtggtagggcttggcgcgattggtcaaatagccatccaactggcgaaacgcgctggcgcgtcggtggtgattggcgtcgatcctatcgcctatcgctgtgatattgcccgtcgccacggtgctgatttctgccttaaccccattggcactgacgtaggaaaagagatcaaaacgctgaccggcaagcagggtgccgatgtgattatcgaaaccagcggttacgccgacgcgctgcaatcggcgctgcgtggccttgcttatggcggcaccatctcttatgtcgcgtttgccaaaccatttgctgaaggttttaacctcggacgcgaagcgcatttcaataacgccaaaattgttttctcccgcgcgtgcagcgaaccgaacccggattatccgcgctggagccgtaagcgtattgaagaaacctgctgggaactgctgatgaacggttatctcaattgcgaagatttaatcgacccggtagtgacctttgccaatagcccggaaagctacatgcagtatgtcgatcagcatccggaacagagcatcaaaatgggcgttacgttttaattcaaaggaatgaaaaaatgaaaataggcacacagaatcaggcattctttccggaaaacattctggagaaatttcgttatatcaaagagatgggcttcgatggttttgagattgacggcaaactgctggtcaacaatctcgaagaagtcaaagcagcaatcaaagaaaccggtttaccggtgaccaccgcctgcggtggctatgacggttggattggcgactttatcgaagagcgtcgtcttaatggcttaaagcagatcgaacgcattctcgaagcgctggcagaagtggggggtaaaggtatcgtcgttccggcagcgtggggcatgtttaccttccgcttaccgccgatgacctcgccgcgtagcctggacggcgaccgcaaaatggtgagtgattccctgcacgtactggaacaggtcgccgcgcgtaccggaaccgtggtgtatctcgaaccgttaaaccgctatcaggatcatatgatcaacaccctcgccgatgcccgccgttacatcgtcgaaaacgatcttaaacatgtacagattatcggcgatttctatcacatgaatatcgaagaagataacctggcgcaggcgctgcatgacaaccgcgacctgctcggtcatgtgcatattgcggataaccatcgctaccagccgggcagcggcaccctggatttccacgcgctgtttgaacagctgcgcgcggataactatcagggctatgtagtgtacgaagggcgtatccgggcggaagatcctgcccaggcgtaccgtgattcgttggcctggttgcgtacctgctaagaggtctttgtgaaaagtgcaatgacaagctctccgctgcgggtcgcgataataggcgcaggccaggtggcggataaggttcatgcttcgtactactgcacccgcaacgatctggaactggtggctgtctgtgacagccgcctttcccaggcgcaggcgctggcagaaaaatacgggaatgcatccgtgtgggacgatccgcaggccatgctgctggcggtgaaacctgatgtggttagcgtctgctcacctaaccgttttcattacgaacataccctgatggcactggaagcgggctgccatgtgatgtgcgaaaaaccgcccgccatgacgccagaacaggcgcgggaaatgtgcgataccgcgcgcaaactgggcaaggtgctggcctacgactttcaccatcgttttgcgctcgatacgcaacagctgcgtgaccaggtgaccaacggcgttttgggagagatttacgttaccaccgcccgcgccctgcgtcgctgcggcgttcctggctggggcgtctttaccaataaagaactgcagggtggtggcccgctgatcgacatcggcattcatatgctggatgctgcgatgtatgtgctgggctttccggcggtgaaaagcgtgaatgcgcatagctttcaaaagatcggcacgcaaaagagctgtggtcaatttggcgagtgggatccggcaacttatagcgtcgaagattcgctgtttggcaccattgaatttcataacggcggcattctgtggctggaaacgtcatttgcactcaacatccgcgaacagtcgattatgaacgtcagcttttgtggtgataaagccggtgcgacgctgtttccagcacatatctacaccgataacaacggtgaattaatgatgctgatgcaacgggaactggcagacgacaaccgccatttgcgcagcatggaagcctttatcaatcacgtacagggcaagcccgtgatgatagccgacgccgagcaggggtacatcatccagcaactggtggcggcgttgtatcaatccgcagaaacagggacgcgtgtggaattatgaccaggccagtaacgttatcagaaccccatttcagccagcataccctgaacaagtatgcatcgctgatggcgcaggggaacggctatcttgggcttcgcgccagccatgaagaagattacacgcgccagacgcgagggatgtatctggcggggctgtatcatcgggcgggaaaaggtgaaatcaacgaactggtgaacctgcctgatatcttggggatggagattgccataaatggtgaggttttctcgttatcccgcgaagcctggcagcgtgaacttgactttgccagtggagaattacgccgtagcgttgtctggcgtaccagcaacggcacaggttacaccatcgccagccgtcgctttgtttcggcagaccaactgccgctcattgtgctggaaatcactattacgccactggacgccgacgcgtcagtgctgatttcaacaggtatcgacgccacgcaaaccaaccacggtcgccaacatctcgacgaaacccaggtgcgggtgtttggtcagcatctgatgcaggggatctacaccacccaggatggacgcagtgatgtggccatcagctgttgctgtatggtgagcggtgatgtgcagcaatgctataccgccaaagagcgccgtttgcagcaacataccagtgcgcagcttcatgcaggcgagacagtgacgttgcaaaaactggtgtggatcgactggcgggatgacaggcaagccgttttagacgagtggggcagcgcgtcgcttcgccagcttgaaatgtgcgcgcagcagagttacgaccaacttcttgcagtatcaacagaaaactggcgtcaatggtggcagaaacgtcgtatcacggtaaatggcggcgaagcgcacgatcagcaagcgttagattatgcgctttatcatctgcgcatcatgacgcctgcccacgacgagcgcagcagcattgcggcaaaaggcttaaccggcgaaggctacaaaggccacgttttctgggatacagaagtatttttgttaccgtttcatctgtttagcgatccgacggttgcccgaagtttactgcgttatcgctggcacaacttgccaggcgcgcaggagaaagcgcgacgcaacggctggcagggcgcgctatttccgtgggaaagcgcgcgcagcggcgaagaagagacgccggaatttgccgccattaacattcgcaccgggctgcggcaaaaagtggcctcggcgcaggcggaacatcatctggtggccgatatcgcctgggcggttattcaatactggcagaccacgggggatgaaagtttcattgcgcatgaaggcatggcgctacttctggaaactgcaaagttctggattagccgcgcggtgagggttaacgaccgtctggaaattcatgatgttattgggcctgacgaatataccgaacatgtcaataataacgccttcaccagctatatggcgtattacaacgtccagcaggcgctgagtattgcccgccagtttggctgtagcgacgatgcgtttatccatcgcgccgaaatgttccttaaagaactgcggctgccagaaattcagcccgacggcgttttgccgcaggatgattcgtttatggctaagccggcgattaatctggcgaaatacaaagcggcggcggggaagcaaaccattctgctggattattcacgcgcagaagtgaacgagatgcaaatcctcaaacaagctgatgtggtgatgctcaattacatgctgccggagcagttctcagcggcatcgtgtcttgccaatctgcaattttatgaaccgcgcactattcacgactcgtcattaagtaaagcaatccacggcattgttgccgcacgctgtggcctgctgacccaaagttatcagttctggcgcgaggggactgaaatcgatcttggtgctgatccgcatagttgtgatgatggtatccatgctgccgcaactggcgctatctggctgggggcgattcagggttttgccggggtgagcgtgcgtgacggtgaattgcatctcaatccggcgttacctgagcagtggcaacagttgtctttccctctgttctggcagggctgcgaattacaggtcactcttgacgcgcagcgtattgcgattcgaacttctgcgcccgtttcactgcgtttgaacggtcagcttatatccgtggctgaagaatctgttttctgtttgggtgattttattttgcccttcaatgggaccgctaccacacatcaggaggatgaatgaaactgcaaggggtaattttcgatctggatggtgtaatcaccgataccgcgcatctgcatttccaggcgtggcagcagattgccgctgaaattggcatcagcattgatgcgcagtttaacgaatccctaaaagggatcagccgcgatgagtctctgcggcgcattctgcaacacgggggcaaagagggcgactttaactcgcaggagagggcgcaactggcgtatcgcaaaaatctgctctatgtccactcactgcgcgagttgacggtcagcgctgttctacccggcattcgctctttgctggcagatctccgtgcacagcagatcccggttgggctggcttctgtctccctgaatgcgccgacgattttagcggcgctggagctgcgcgagtttttcaccttctgcgcggatgcttcccaacttaaaaactcgaaaccggatccggaaatctttctcgctgcctgtgccgggctgggcgtgccgccgcaggcatgtatcggcattgaagatgcgcaggcgggcattgacgccattaacgccagcggtatgcgctcggtggggatcggcgcgggcttaaccggggcgcaattactgttgccttcaacggactctctgacctggtcgcggttatcggccttctggcaaaacgtatagcaaaggaatcaacatggctcagctttcgttacaacatattcaaaaaatctacgataaccaggtgcatgtggtgaaggacttcaacctggaaattgccgataaagagttcatcgtgtttgtcggcccgtcgggctgcggtaagtcgaccaccctgcgcatgattgccgggcttgaggagatcagcggcggcgatctgttgatcgacggcaaacgaatgaatgacgttccagccaaagcacgcaatatagcgatggtgttccagaactacgcgttgtatccgcatatgacggtttacgacaacatggcgtttggcctgaagatgcaaaaaatcgccaaagaggtgattgatgagcgggtgaactgggcggcgcaaattctcggcctgcgtgagtacctgaaacgcaagccgggcgcgctttccggcgggcaacgccagcgtgtggcgctcgggcgggcgattgtgcgcgaagcgggcgtgtttttaatggatgaaccgctctctaaccttgatgccaagctgcgcgtgcaaatgcgcgcagagatcagcaagctacaccagaagctgaataccaccatgatctacgtgacccacgatcagaccgaagcgatgaccatggcgacgcggattgtgattatgaaggatgggattgttcagcaagttggtgcgccgaaaacggtttataaccaaccagcgaatatgtttgttgccggatttattggatcaccggcgatgaattttattcgtggcacgatcgatggcgataaattcgttacggaaacgcttaaattaaccattcccgaagagaaattagcggttctgaaaacacagggaagtttgcataagcccatcgtgatgggaatacgtccggaagatattcatccggacgcgcaagaggaaaataacatttccgccaaaattagcgtggcagaattaaccggtgcggaatttatgctctacaccacggttggggggcacgagttagtggtccgtgctggtgcgttaaatgattatcatgcaggagaaaatatcactattcattttgatatgacgaaatgtcatttctttgatgcagaaacggaaatagcaattcgctaaatacagggggaaggcattcccccagaataatacaaggaacaataatgaaaaagttattaccctgtaccgcactggtgatgtgtgcgggaatggcctgcgcacaggccgaggaaaggaacgactggcactttaatatcggcgcgatgtacgaaatagaaaacgtcgagggttatggcgaagatatggatgggctggcggagccttcagtctattttaatgccgccaacgggccgtggagaattgctctggcctattatcaggaagggccggtagattatagcgcgggtaaacgtggaacgtggtttgatcgcccggagctggaggtgcattatcagttcctcgaaaacgatgatttcagtttcggcctgaccggcggtttccgtaattatggttatcactacgttgatgaaccgggtaaagacacggcgaatatgcagcgctggaaaatcgcgccagactgggatgtgaaactgactgacgatttacgtttcaacggttggttgtcgatgtataaatttgccaacgatctgaacacgaccggttacgctgatacccgagtcgaaacggaaacaggcctgcaatataccttcaacgaaacggttgccttgcgagtgaactattatctcgagcgcggctttaatatggacgacagccgcaataacggtgagttttctacgcaagaaattcgcgcctatttgccgctgacgctcggcaaccactcggtgacgccgtatacgcgcattgggctggatcgctggagtaactgggactggcaggatgatatcgaacgtgaaggccatgattttaaccgtgtgggtttattttacggttatgatttccagaatggtctttccgtttcgctggaatacgcgtttgagtggcaggatcacgacgaaggcgacagcgataaattccattatgcaggtgtcggcgtaaattactcgttctgataatgggctaaattgccggatgcggcgcgagtactttatccgatctataaatgtaggccggataagatgcgctagcatcgcatccggcattcaggcaaggtagctggtatttatttcagcgtcatatgcgtggcaacggtaatattctgtggtgacggttttccagaaattaagcggaataataactcgcagctttgttgacctaactcctgcgtcggaacatcgatgccgcctggtgcaggcgttaaaataaacgacagcgtttcattactataacccaccaccgctaactgctgcggaatagcaatatttttctctgccgccgcacgataaatgctcattaatttcaggctgtcagtggcaaacactgcctcaggcaacggtgactgacttaataattgccgtgctgcttgcagtgctgtttcatgggtataaccgccgtcaacaatccatttatcacgcactgcaatattatgcgcggacagactttgcttatagccattaacgcgatcaaccgaaacatggacatcaagcggagcatgcaggcaggcaatattttgatgcccactttcaattaatgcatcggtcaacgcaatgctgtcgccaaaattatcggtatcgacagaataaacatgggcatattgaccttcaactttgccaattaccaccaccggaatatcgtatttatcgagttgggcaaaaaatgactcatccgctggcgaactgagcataataatgcctttaatcattttctgcttaattttgctttcacatttttgtaagtcttctgccggattgtgcgacgtctgcaatatcacgtcgaaaccttcctcttcagctttggcggtgatggcatgcaaaacttcagagaaaaacggattacccgccgtagttttggtcgaacgggtagaaatcaccataatggcatcaaaacccgaagaggtcagcgcgcgggctagcttgtttggctgatactgtaattcttcaatggcccgtaacactttttcgcgcgcttccggggagatattagtttgcttattcagcacgcgtgatacggtggattttgatacgcctgcaaccctggcaatatcataaatagtaggggacataggtcaggaactccgtccgaacgtgaatgctgcacatcttatggagttcgcccgtcgatgacaacacgggcagttgataatcaatggcctggcccccacattcatatccttacgaatgatttttttctggtcttcagagcagcacaggacagcaatgaagcgacttaaaaatgaacttaatgcgctggtgaatcggggtgtcgacagacatctgcgcctcgccgtaaccggactaagccgcagcggcaaaacagcgtttatcactgcgatggtcaatcagttgctcaatattcacgccggagcacgcttgccgctgttaagcgcggtgcgtgaagagcgcctgctgggcgtgaaacgcattccccagcgtgactttggcattccgcgcttcacctatgatgaagggctggcgcagttatatggcgatccacccgcctggccaacgccaacgcgcggcgtcagtgaaatccgcctggcgctacgttttaaatcgaacgattcgctgctacgccacttcaaggacacctccacgctgtatctggagattgtggattatcccggcgaatggttgctcgacctgccgatgctggcgcaggactatttaagctggtcacgccagatgacgggcttactcaatggtcagcgcggcgaatggtcggtcaaatggcgaatgatgtgcgaagggctggacccgctagcacctgccgacgaaaaccggctggcagacattgccgccgcgtggaccgattatctccaccactgtaaacagcaggggctgcactttattcagccagggcgctttgtcttgccaggagatatggcaggtgcgcccgcgctgcaattcttcccgtggccggatgtcgatacctggggcgagtccaaactggcgcaggccgataagcacaccaatgccggaatgctgcgcgagcggtttaattattactgcgagaaggtggtgaaggggttctataagaatcattttctgcgctttgaccgccagattgtgctggttgattgcctgcaacctctcaacagtgggccacaggcatttaatgatatgcgtctggcactgacgcagctgatgcaaagtttccactacgggcagcgtaccttgttccggcgtttgttttcgccggttatcgataagctattgtttgctgccactaaagcggaccatgtgaccatcgatcagcacgccaatatggtttcattactgcaacaactgattcaggatgcctggcaaaatgcggcgtttgaagggattagtatggattgcctggggctggcctcggtgcaggcgaccaccagcggcattattgatgttaacggtgagaaaatcccggcgctacgcggtaatcgactcagcgatggcgcaccgctcactgtttatcctggcgaagttcccgctcgtttgcccggtcaggcgttctgggataagcaaggcttccagtttgaggcgtttcgtccgcaggtgatggatgtcgacaaaccgctgccgcatattcgccttgatgccgcgcttgaatttttaataggagataaattgcgatgaccgaaccgttaaaaccacgtattgatttcgacggttcgctggaggtcgatcagaatccaaaattcagggcgcagcagacctttgacgaaaatcaggcgcaaaattttgcccggccacgctcgatgaagcgcctgaagaagaggggcaagttgaagcggtaatggatgcagcgttacgtccgaaacgcagcctgtggcgcaaaatggtgatgggcgggctggctctgtttggcgcaagcgttgtcgggcagggtgtacagtggacaatgaatgcctggcaaactcaggactgggtggcgctgggtggatgtgccgctggggcattgattatcggcgctggcgtaggttctgtggtaacagagtggcggcgcttatggcgcttgcgacagcgcgcccatgaacgcgacgaagcgcgcgatttgttgcacagccacggcacgggcaaaggccgcgcattttgcgaaaaactggcgcagcaggcgggtattgatcagtctcatccagcgctgcaacgctggtatgcctcaatccatgaaacgcaaaacgaccgtgaagtggtcagtttgtatgcgcatttggtccagccagttttagatgcccaggcgcggcgcgaaatcagccgttcggcggcggaatcaacgttgatgattgcggtcagcccgctggcgttggtcgatatggcgtttatcgcctggcgcaatctgcgtttaattaatcgcatcgccacgctgtatggcattgaactggggtattacagccgtttgcgtctgtttaagctggtattgctgaatatcgcttttgccggagccagcgaactggtgcgcgaagtggggatggactggatgtcgcaagatctcgctgctcgtttgtctacccgcgcagctcaggggattggtgcaggacttctgacggcacgactcgggattaaagctatggagctttgccgcccgctgccgtggattgacgatgacaaacctcgcctcggggatttccgtcgtcagcttatcggtcaggtgaaagaaacgctgcaaaaaggcaaaacgcccagcgaaaaataatgcaatatcgggtgctgaccggatatctttacgccgaagtgcccgtttttccgtctttgtgtcaatgattgttgacagaaaccttcctgctatccaaatagtgtcatatcatcatattaattgttcttttttcaggtgaaggttcccatgcgtctggaagtcttttgtgaagaccgactcggtctgacccgcgaattactcgatctactcgtgctaagaggcattgatttacgcggtattgagattgatcccattgggcgaatctacctcaattttgctgaactggagtttgagagtttcagcagtctgatggccgaaatacgccgtattgcgggtgttaccgatgtgcgtactgtcccgtggatgccttccgaacgtgagcatctggcgttgagcgcgttactggaggcgttgcctgaacctgtgctctctgtcgatatgaaaagcaaagtggatatggcgaacccggcgagctgtcagctttttgggcaaaaattggatcgcctgcgcaaccataccgccgcacaattgattaacggctttaattttttacgttggctggaaagcgaaccgcaagattcgcataacgagcatgtcgttattaatgggcagaatttcctgatggagattacgcctgtttatcttcaggatgaaaatgatcaacacgtcctgaccggtgcggtggtgatgttgcgatcaacgattcgtatgggccgccagttgcaaaatgtcgccgcccaggacgtcagcgccttcagtcaaattgtcgccgtcagcccgaaaatgaagcatgttgtcgaacaggcgcagaaactggcgatgctaagcgcgccgctgctgattacgggtgacacaggtacaggtaaagatctctttgcctacgcctgccatcaggcaagccccagagcgggcaaaccttacctggcgctgaactgtgcgtctataccggaagatgcggtcgagagtgaactgtttggtcatgctccggaagggaagaaaggattctttgagcaggcgaacggtggttcggtgctgttggatgaaataggggaaatgtcaccacggatgcaggcgaaattactgcgtttccttaatgatggcactttccgtcgggttggcgaagaccatgaggtgcatgtcgatgtgcgggtgatttgcgctacgcagaagaatctggtcgaactggtgcaaaaaggcatgttccgtgaagatctctattatcgtctgaacgtgttgacgctcaatctgccgccgctacgtgactgtccgcaggacatcatgccgttaactgagctgttcgtcgcccgctttgccgacgagcagggcgtgccgcgtccgaaactggccgctgacctgaatactgtacttacgcgttatgcgtggccgggaaatgtgcggcagttaaagaacgctatctatcgcgcactgacacaactggacggttatgagctgcgtccacaggatattttgttgccggattatgacgccgcaacggtagccgtgggcgaagatgcgatggaaggttcgctggacgaaatcaccagccgttttgaacgctcggtattaacccagctttatcgcaattatcccagcacgcgcaaactggcaaaacgtctcggcgtttcacataccgcgattgccaataagttgcgggaatatggtctgagtcagaagaagaacgaagagtaagcgcgaatatgcctgatggtgcaacaccatcaggcatattaaattatgctttcagtacagccagagctgcttcgtaatccggctcggtggtgatttcatccaccagctggctgaaaatcacattgtcattttcgtcaataaccacaacggcacgcgctgccagacctttcagtgggccatcagcaattgccacaccgtaagcttgcagaaattcagcgttacggaaagtggagagggtgataacgttgttcagaccttctgcgccgcagaaacgagactgggcgaacggcagatcggcagagatacacagcacaacggtgttgtcgatctcagttgccagttggttaaacttacgtactgatgcggcgcaaacaccggtatcaatactcgggaaaatgttcagcactttgcgtttacccgcaaactgaccgagggtgacgtcagacagatcttttgccacgagagtaaaagtctgcgctttgctacccgcctgcgggatggaattggcgactgtaaccgggttgccctggaaatgaacggtttgtgacatgattatctttcctgtttacatatagttaacgtcacacctagtttatgctaactgtcaataacacagcaaacgctatttgcgcttaatctgcagaccaccgcgacaacaaggagtaaagatgagaaccgttaaggtatttgaggaagcctggcccttacataccccgtttgtgattgcccggggaagtcgcagtgaagcgcgcgtggtggtggttgaactggaagaagagggtattaaaggcaccggcgaatgcacgccgtatccgcgttatggagaaagtgatgcctcggtaatggcgcaaattatgagcgtcgtgtcgcaattagagaaagggctgacacgggaggagttgcaaaaaattctccctgccggcgcagcacgtaatgcgctggattgtgcattgtgggatctggccgcgcgaaaacagcagcaatcgctggctgatttgatcggcataacgcttcccgagacagttatcactgcacagacggtagtcatcggtacgcctgatcagatggccaatagtgcatcaacactctggcaggcaggcgcgaaattactgaaagtgaagctggataaccatcttattagtgagcggatggtggcaattcgcacagctgtgcccgatgcgacgctgatcgttgatgcaaatgaatcctggcgtgcagaagggttggcggcgcgttgccagctattggcggatttaggcgttgcgatgcttgaacaaccccttcctgcgcaggacgatgcggcgctggagaattttattcatccgttgccgatttgtgctgatgagagttgtcatacacgtagcaatctgaaggcgctgaaagggcgctatgagatggttaacattaagctcgataaaaccggtggtctgacggaagcgctggcgctggcgactgaagcgcgtgcacaaggtttcagtctgatgctgggctgcatgttgtgtacctctcgtgccattagcgccgctttaccgctggtgccgcaggtcagtttcgccgatattgacggaccgacctggctggcggtagatgtggaaccggcgcttcagttcacgacgggcgaattgcatctttaggatgccagcgcagcaagtttgccatcgcaaagagatatttttcgctggcttcgtcggaggagatgggcggaaactctgcggtgatgcaatgcaagttgagatctgcacaccaactgccgaaagagccaggcgtttcataaccgacgctggttaccagaggcaattcaaacgcctgggccagccattcgcctaattcgctgtgtctgggatcttcaatacaggccagtggatcgtggaatgagaccacccaggcaggttgaatgcggtgtataagctggcacagcgcctgggtttcaggttctgagccaggtttgtcacctgtcagtaatacgacatcacgttcttcagcggcgctgttccagcgataaaccgtttcaccttccttccagttcgccgccggaaagtttctgtttaaatccacaccattagcattggcccgtaaccccagctggcagccgtcaggattcgcacacagcaccacatgatggcggcgcaaagaaggtgtcaacgtccgcagagcacaggagagcgtgacgaccgaagagttttcatcaccgtgagtgccagccagaatcaaaccactttcgcggctgggtgcaggggcaggaaaccagattaacggcgcgcccaataatgaacgtccgtaatgttctgttccgggcggaaatgcgccgcgttcggcgcgtgggcgggttacggtcatgatcgtctctggttcaggaagtattacaggcagtgttgtgcaaattttgcggattatcaaatccttttcttcaacgctatgtcatcgatcttgtatcactttatttgccggaagttgtttgcattttattagttggatagggtttgtggatttttgctggctgacgggcaaataaagtttgtttaatggtttgcttatctgccagttgattaatcacatggcgggctatctgaccgccagcaccaagaatcagtacctttttcatgaaaattatcccagattattggcagcaatatgccaggccatatcactattgcggatttgaatatgtttcattacagagtttcctcaaagaacggagctaatactgaaattgcttcagccacataggctttgccgtcataaagatccatatggtttgcgccttcaacaatgtgatagcgtttatcctggcttgatgctcgatcgtacaggtcgtcactcatccatttgctccctgcctggctgcccgccacaatctgcatcggctgagtcaggtacacttccgccatatggtaagcatcataggtaataatctggttaaggctgcgcaaagtagcgtaacccggtgctgttggatactgcgcgcgaggggtgtggtaatactcccaggcctgacgcagttcttcgttcggcgcatcggactccttcattggtgccagtggcataacggcatattctccgctgctaatatcgctggttcgggcgtttgaacccgcttcaacgtatggcagggcatcaatagatttcacattgttttcccaaccattacggaacatcgaaccaatattgaccgcactaacggtaccgatggccttgatgcggcgatcctgaattgcagcattggctgtatatcctgcaccggcacaaattcccatcgcaccaattcgggtattgtcgacataagaaagcgttgtcaggtaatcaatcacggcactgatgtcttcagtacgaatgtatgggttttctaactgacgcggctcgccgccactttcaccttgataagatgcgtcataagcaatagtgacaaatcccttttccgccagttttttggcataggttccggccgtttgttctttaacgcccccacctgggtgagataccacaattgcctgatactgacgggtttcatcaaattttggagggaaatagatcactgcagacaaagagatggttggattattgctgttagtgaagctgactttattattcatcattccgttcctcatggagttgtcggttcgttttaacggttggtgatatcactatagatattgatcattaagttgattagacccaaaatcatgattagacctatcatttaaatgattaatagattgcatggagatactgaatgaagcgtgaagaaatcgctgatctgatggcgtttgtcgtcgttgcagaggagcgtagcttcactcgtgcagcagcccgcctgagcatggcgcagtcagctttaagccagatagtgcgtcgtatagaagaacgattgggattgcggcttctgacgcgaaccacgcgcagcgttgttccaactgaagcgggcgagcatcttttgtctgttcttggccctatgttgcatgacatagattcagccctggcatccctgagcgagctgcagaaccgcccatccgggacaatacgtattactactgtagaacatgcagcaaaaacgatattgttaccagcaatgcgcacattcctgaaatcgcatcctgaaattgatattcagctcaccattgattatggtttgaccgatgttgtttctgaacgttttgatgcaggcgtccgtctgggtggggagatggataaagatatgatcgccattcgaatcgggccagatataccaatggctattgttggctcaccggattatttttctcgccgaagtgttccaacgtcagtgtcacaattaatagatcatcaggcaattaatttgtatcttcccacatcgggtacagcaaatcgctggagattaatacgcggtggacgtgaagttcgtgttcgcatggaaggtcagcttttactgaatacgatagacctgatcattgatgctgcaattgatgggcatggattggcgtatctaccttatgatcaggttgagcgggctattaaagaaaaaaaactgatacgtgttttggataaattcccaccagatttacccggttatcacctgtactatccacaccgtcgacatgctggctcggcattctcattatttatagataggctgaagtataaaggtgctgtttagcactacttgctgatacattaatttaatttctctcttaacgtattctcagttcctttcaacgttttggttattttttattcttcgtacaatggcgacagatgctgattatgataccgaaaactggtttgaacgtgcgaagcctgaacgtagtgttcggtgttctatgtgctttaccgcattttggcgtcgattatttacactaaatctgatttaatatattgatacataaaacattttatgcttcctgtgtcacttttttgatggaagttgtttgcatttctttaaggcgaaacaaataattacgcatcaattttaatgtcggttagagggaaacttatgaagcactctgtttcagtcacgtgttgtgcgctgttggtcagcagcatttctctttcgtatgctgcagaagttccgagcggcacagtactggcagagaagcaggagctggtgcgccacattaaagatgagcctgcgtcgctggatcccgctaaagccgtgggcctgccagagattcaggtcattcgcgatctgtttgaaggactggtgaatcagaacgagaaaggggagattgtccccggcgttgcgactcagtggaaaagtaatgacaaccgtatctggacttttaccctgcgcgataacgcaaaatgggcggatggcacaccggtaacggcgcaagattttgtctacagctggcagcgtctggtggacccgaaaacgctatcgccatttgcatggtttgccgcgctggcgggaatcaacaacgcacaggcgattattgatggtaaagctacgcctgaccagcttggcgtcaccgcagttgatgcccataccttgaaaattcagcttgataaaccgttgccgtggtttgtgaatttaaccgctaactttgccttcttcccggtgcaaaaagccaacgtagaaagcggtaaagagtggacgaaacccggaaatctgatcggcaatggcgcttatgttcttaaagatcgcgtagtcaatgaaaaactggtcgtggtaccgaatacccattattgggataacgccaaaacggtactgcaaaaagtgaccttcctgccaattaatcaggaatccgcagccactaagcgttacctcgcgggggatattgatatcaccgaatccttcccgaaaaatatgtatcagaagctgttgaaggatattccggggcaggtttatacgccgccgcagctcgggacctattattatgcgtttaacacgcaaaaagggccgacggcagatcagcgcgttcgtctggcattaagtatgacgatagatcgccgcctgatgaccgaaaaagtattagggacgggcgaaaagccagcgtggcattttacaccagatgttaccgccggatttacgccggaaccttcgccgtttgaacaaatgagtcaggaagaactgaatgcgcaggcaaaaactttgttgagcgcagctggttatggtccgcaaaaaccgctgaagctgacgcttttgtataacacttcagaaaaccatcaaaaaattgcgattgctgtagcatcgatgtggaaaaagaaccttggcgtagatgttaaattgcaaaatcaggaatggaaaacctatatcgatagccgtaacaccggcaattttgatgttatccgcgcctcatgggtgggggattataatgaaccctccactttcctgacattattaacgtcaacgcattcaggaaatatttcacgctttaacaatccggcatacgacaaagttctggcccaggcatcgacggaaaataccgttaaagcgcgtaatgccgattacaacgcggcagaaaaaatcctcatggagcaagcaccgattgcaccaatttatcaatataccaatggacgattaatcaagccgtggctgaaaggttatcccattaataacccggaagatgtggcgtacagccggactatgtatattgtgaagcattgatgtgatgggaactggcgttacccttgtggataacgccagtgatgtctgatttagcgcccctgttcctgcggtgtaatgttatccatatacagcgtctggctggggaaggcaaagtccgcgccgtgtgactgcacaatatcgataatcttcaaataaacgtcttgctgtgcagcaagccattcagcccataccgtggttttggtaaagcaataaaccataatattcaatgacgagtcggcaaactggttgaaataaaccagtaaggtttgtcgctggtcgatggccgggtgatttttcagcatctcacgtacggcttcgacaataacgcccacttttgccgcatcctcataacgtaaaccaatggtcgtggtaatgcggcggttggtcattcgtcctgggttttctacgctgatcgacgaaaacagcgagttcggtacgtacaatggacgattatcaaaggtcgtaattttggtaattcgccagccaatttccgctactgtaccttcgatatttctgtccggtgaacggatccagtcgccaatactgaaaggacggtcgaaatagagcatgatcccggaaaagaaattactcagaatatctttaccggccataccgacagccagaccaccaataccaccaaaggtcaacaagccagaaaggctcatgccgaaatgttcgccataaagcagaacaagcaccacaataatggtgattttgataatgcgcgacataatccgcgcactggtgatatcgcgaccttttttaatctgctgtttttcaaactgattaatcagcaaaatagcttaatcgtcagaataaccgcaatcagggacgtacagataaaatcgataacgcctggggtgataaatttgagtttatagttttctataacataattaataatgctaccaacagcactgataattatggtgtagattaaaaattgcaccgcatggaataaaaaaccttttcttttacgatttccgcggcgaaaccaaaagctcatcagaatcaatgctgcgcagctaccgaaaataatgaccagattaagcgcattatttgtaaacagttcagcgatcattgttttatcaggctcctccagataattgtcgtcatgccggaaacccctggcggggctattttaccgcgacaattcattcagatcatcaatagtcagggaaggaagtagcaacattagctaactaatcaatgcgttgattgtaaatccagctaagaggtgaggttttcagagcagacaacggtgaaatgtcatggtattgttacgtttaggtaacaagaaatttgtctgcacaaggattacatcatgattatggcgaaactgaagtcagcgaaagggaagaaatttctctttggtttgttggcggttttcattattgcggcgtcggttgtgactcgcgcgactatcggcggcgttatagaacagtacaatattccgctgtctgagtggacgacatcaatgtatgtgattcagtcatcgatgatttttgtttatagcctggtctttactgtgttgctggcaatcccgttgggaatttatttccttggcggcgaagagcagtaagtaaaaaataggcccgataactcgggccttgtcagttattgaagagtcgttaatcgtcttcttcgtcatccagttcaacgggtgtctgatactggtcaggtttaatgaccaacagatcgcagcgaagatgatcaatcacctgttccgccgtgttgccgaggaatgctgctgaaataccggtgcgtcctaccgtgcccagaaccacaatccccgcctgtaagtgttccgccaaatcaggaatcacctcttctggcagacctttttctacgtgcgtcatgttttcattaatgccgaatttctgccgcagagctttcattgccagcaaatgttgcccacgaatggcatcgttataaacgctcggatcaaattccggcagttcaatcgcgatattaattggcgttaccggataagcgccaaccagatgaacttcggtatggttgacttgttctgccagttcgatcgtctctttgaccagtttttcattgagcgcattatgatacggctcttcactggcgagattcaccgccaccagcgccttgcctccttccggccacggctggtctttcaccatccacaccgggcttgggcatttgcgtaacagatgccagtccgttggcgtaaaaatcaccgcttccagacggtcatgttggtgcgccatttttagcaccaaatcgtgcccgccgctgatcacttcctgaatgatggcttcgaaaggacggttatgccagaccactttaatttcaatgggaacgccagcattgagataatattttgcctgctcgtggatccaggctgtacgctggctgatgacgccctgatgcatagccgtacgttcgtccggggagagcagggtggtcatttcgtatgagaagtcatagatcggcaaaaaggctttaattttgccaccaatccgttgatgtaaataaacagctcgccgcaatgctggttggtcgtcctggttaggatcgataacaacgagcatgttctgatacatagccatacagggtctccttacaacaactgtcaacgcagtttgtaattaaaagattaacccatatctggtgaatgaaacagtgatgaaccttctgccagatcaataaatcagaaaaatttaatgatatgacagaaggatagtgagttatgcggaaaaatcaggcaacattacgcgtatgaccagcaagctgggccagcgcatcgttattttcgatggtgatgtatttacctttgactgccagcataccgcttttctggaagcgacctagcagacggctgatggtttctaccgtcaggcccagatagttaccgatatcgccacgagtcatcgtcaggcggaattcacgaggggagaagccgcgttgggcaaaacgacgggacaggttgtagatgaatgcagccagacgttcctcggcatttttcttcgacaacagcaggatcatgtcctgatcgcctttgatttcaccgctcatcagacgcatcatctgctgacgcagattcggcattttaccggacaaatcgtccagcgtttcgaacgggatttcacataccatcgaggtttccagcgcctgagcgaagctcgggtgatggccgctgccgatggcgtcaaatcccaccaggtcgccagctaaatggaaaccagtgatttgctcgtcgccttgctcagtgatggtataacttttaatcgtaccggagcggatggcataaagcgatttaagttcatcaccagccttaaacagcgtctggcctttctgaataggcttcttccgctcaatgatattatcaagctgatcaagctcatgttcgttgagtgtgaacgggatgcaaagctggctgatgctgcaatcctggcaatggatagcacaaccgccagactgaatgcgccgtataattcgcttttccgggatcataggtctgctcaagccgtaattgatatttgtcaattttaacatctttttagggagcaagtaagtctaagcaaaccttaacagcagagaattccgatattagatgtaaatatatgtctatctatttgaaaaccattaagttgttaagggtaactttacataaaagtgtgaacaagctggcacaaattgtttaatgtttacagcaaaagataaccttcgtggcgcaataaccactcttttcgctgaactccgcctgcatatccggtcatggtgccgtttcggccaataacccgatggcaaggtacgacgatgctgatgggattcgatccgtttgccgcaccaacggcacgcgccgcgccagggcggcccaattgttcagccagttggccgtaatgcattacctgcccgcaggggatagtgcgtagagttttccagacttcgcgctgaaatggcgtcccccctgtggcagtgggaagcgtatcaataatgctaagattaccggcaaaataatcactaagcttgtcgcttaaaccgcctgggttggtggcagaaatgcgctcatagccttctttgcgataatggatgtccagcagctgcaccatgcgttcgctgtactcttcccattcaaccgcccgcaggcgaaattgctcatcgcaaatcacccacagtggacccagtggcgtggcaattttttcttcaagtaatctcagcatccgttctctcttaagacaaacgtgggtaaatccccggacctatcggcagaccaacaagataccacgccagcaacatcagcagccataccaccaaaaagataagcggatagggcaagactaacgaatagtaagtacccagtttcgcgtctggtttgtagcgttgcaggaatccaagaaacagtgggacaaaaggagataccggcgctaaaggcaatacggatgagtcggcaatacgaaagaggatttgcgcaaatgccgggtgaaagccaagtagcataaacattggtacgaaaatgggggccagaatcgaccagattgcggaaccgctggcaataaacatgcataagaaagaggaaagcaacgccagaccgacaaacgccggtatgccgctaagccctgaactttccagtatatcggtcagccccacggcgatgaatttccccatgttgctccagttaaacatggcgacaaattgggcgaggggaaaaaccatcacgataaatcccgccatctctttcatcggttcaatcattaaatgcggtaaatccgcctgacgtcgaattgtgcgggtagcgatgccataagccagcgaaaccacaaagaaaaaaagaatgattagtggcacgatacctttaataaagggtgatggcatcacggtgtgattaatcggatcgcgcaatatcccgttttccgggatcaccatcagcgcgatcgcagcaataaaaagtagcgatacgacacctgctatgcgtaaaccaaaacgctgactttcggtcaatgtctgcagtttctcatcgctgtttccctgccattgacctaaccgtggctcgatgattttgtcggttatcaagccgccaacaatcgtcagtacgactacggagctggccataaaataccagttatcaattacactgacgtgcatttgcggattgaacgcagccgccgcttccgtgctgatccccgacagcaacacgtcggttgtgacaatcagtaaattagccgtaaagccgcaacctacgcctgcaatggcagccagtaaacctgcaactggatgcctgcccaccgccagaaaaatcagcgcacccatcggtggcatgatcactaacgccgcatcggaagaaatgtggctgaaaaaagcaataaacagcaccatataactggtgtagcgggcattaacatgcgatgccattttaaccattagcgctggcagtaagccgacgcgctccgctaggccggcacctaaaaccagcgccaggatcgctccaagtggagcaaaaccgctaaagtttttaatcacattgggtaaaaaccagtgtaatccttccacactgagcaggtttttcaccaccaccggcgtaccatcggtcgggtttttcgcactgacgccaaaggctgacaaaattgccgtcgtcaccatgagtacgattatcaaatagataaagagcaaaaaaggatggggaaccttgttaccaattctttcgacccagccatagagcttcccggattgggaggacgacggtatggatgacatactcatgggcattcctcggttgttgtgtttgcgttgttgttgttattttaaaggtgacggtgtcacgtttttcgggatagggcagtgatacggttgcgtgtccgtaacttgctgatgctcttgttggcattcttgcaatagccctgaatcaatgaagagattgactgtggttgctgccatagttttcgccgccagcagcattcctttatgagcaatagatgttcgcccctggctaaccagttgccacgtatgtagcggtgtaccgacggcaaaacaggggctgaaacactgggcaacaggcagtttccaactgacgtcgccgacatcagtcgatgccgcaagcacgttatcggtggcggcatatggagcgacctcattcgccagtaccgtttcacgatgacgtagtgcaaaagccttgccgttttcgccaccggttgcggcgatattattcagactgttttgccgatcgttgggggtgagcgtagcctgaatttgtttcgcaaaagccagttcttcggagttccattccggggtaccaaaatgggatagggcatggtacatggcattttctaaggtgcgattcgggagataactggaacaggctttgtcgaagcggcattcaaccgtggtttcggtcatcaatgccgcaccttcggcgattttggcgacccgatcataaatatgctgcacgtcggtcatttcggggcgcggataagataaagcacttctgcctgcgcctggaccacgttgggcgagatcccgccgctatttgtgatggcatagtgtacgcgcgctttttcaataatatgttcgttgaggaagttggtgccagtggtcatcaacgttacggcatcaagggcgctgcgtcccaaatgaggggaattcgcggcatgtgctgcgatccctttaaagcaccatgatgcctgaatgtttgccagcgtgcgggtattgaacatgccggcaaaggcttccgggtgccaggtgagtgccgcatccacatcatcaaataccccctcgcggaccatgaacgttttacccgagccgccttcttcgccaggacaaccataaaagcgcactgtgccgccttgcccatattgttccagccatttcttgacggctattgcagcggcaaaggcggcggttcccagcaaattgtgtccgcaaccgtgaccattttcaccgggcgtcgcggatgtaggttgcgcgcaaccagcttgctgacttaaacctgccagggcgtcatattctcccagcagggcgataaccggtttgccttgaccaaacgaagcaataaatgcatttgggatattgcctacgttgcgggtaacggtgaagcttgcagattccagcgccgaagccagatgctccgctgaccagaactcttcaaaacgtgtttctggatgatcccagatttgatcggcaatatcggtataacgttggcgatcggcttcaatcgcatcgtcgataaaacgatagatttcctgcatcagatacctcgcgtccagggaaaattgagcgcggtgcgcgccagcgtttcgacggcaatagcgagaacctgctcgtcaaaatcgaatttttcgttgtgatgacctgccgccagctgtgtgccaaacaccacgtaggaggcttgcccttgatgttgctgcacgcgggccatcattaatgtggcatcttcggaacccgcaggcgcttcaacacgttcaatggcctgattgacccccgcgacctgagccgcctgactttgcaaccatgcgacccattgcggcgaaggagaactggcggtagctgcacccatcagacgagtttcaacgccgacaccatacatggttgctgcgccctgaatcgcttgttgtgcacggtcaaaaacatattgattaatgacgtcgctggccccgcgtgtttccactttcagcaacgccgaggcaggaacaacgttacggccgcttcctgcctgcataacgcccacgtttactctggaagctccttcgctgtgcggggcgattgcatgcagtgcaagagttgcttgtgctgccgccaacaaggcattgtgaccgtcttctggttttgcgcctgcgtgagcggcggtaccggtgaagtgcgcgtcaaatttggtggttgccataaaattatcactgccgcacaccacggtgcccgcaggtacgccagtgccaatgtgcacggcagtaaaataatcaacatcatctacgacacctgcatcgaccatcgcccgcgcgccacgcgtaccttcctctgcaggctgaaaaatcagtttgatgacgccatgtagtccggactcgaattgtttaagggtatgcgccagcccaagcccaatggcggtatgtccatcatgaccacaggcatgcatcattccggcgttacatgacgcaaaaccgtcgcggtaggggcgatggctgacatcctgctcttcactgagatccagcgcgtccatatcgacacggaaagccatcaccggaccggggcgaccggtatccagggtggcgacgataccagtgaaaccaccttcaaaaaccgcaatccattgtgctagcgcaccctgttgacgagcgcgctcgaattcgcgttgtagagtgagttcatcaggtagtcccatccggctactttcattaactacttcgcggcccagcgccagtgaatagccgagctgctgcaattcttccgcaacaagggtggcagtgcggaattccacccagccagactctgcatagtgatgaaaatcacgtcgccagtgcgataattttggggcaagcgaattaacaaattgattcaaagactccataacctttcccgtcatcagtaaaaagtgtgacccggttcacgtagcgatagtttttacttatcactaactgatttttcacagttttaaccgttcataaattaccctgacacaatcatctgcattaaagtagatgccagtttctttggtctgataaataacggttatcggtggcgtcatgacttttcaggtaaaaattcatcaaattcgtgcttttgttgaagtggctcgtcagggcagcattcgcggagcgagccgaatgttgaatatgtcgcaaccggcactgagtaaatctattcaggagctggaagaaggattagcggcgcaactcttttttcgccgtagtaaaggcgtgacgttaactgatgccggtgaaagtttttatcagcacgccagtcttattcttgaagagctgcgcgcagcgcaagaggaaattcgccaacgacaagggcaactggcagggcagattaatatcggcatgggggccagtatttcccgcagtctgatgccagctgtcatatctcgttttcatcagcagcatccgcaggtaaaagtacgcattatggaagggcaactggtgtcgatgattaatgaattgcgtcagggagaattggatttcaccatcaatacctattatcagggaccgtacgaccacgaatttacttttgagaaattactggaaaagcaattcgcgatcttttgccgcccgggacaccccgccattggtgcccgttcgatcaaacagttactggattacagctggacaatgccgacgccacacggcagttactacaaacagttgagtgaattgcttgacgatcaggcgcaaacgccacaggtcggtgtagtctgcgagacgttctcagcctgtatcagtctggtggcaaaaagcgattttctcagcatactgcctgaagaaatgggctgcgatcccttgcacggacaggggctggtgatgttgccggttagcgaaattttaccgaaagcggcctattatttgattcagcggcgtgatagtcgccagacaccactgaccgcgtcattaatcacgcaattccggcgagaatgcggctatctgcaaagttaaaactgcataaaaaatagagtctgtcgacatccgccagactctacagtacacacagcagtgcatccgcgtcttaagtccggcattgtctcctctgcgccggtgactgtgttataacggttttaacctttagttgccaattttcttcagtgacagatttcacgaaaatataagttacattattaatatcgtgaatgaataatcatgcataagcattttgcttaaaatatcggcaatatttggaacttattactggaattttgggtaatacgttgttggaccgacccggtctggttatcatatcgcgctcttaattgcgggaggatgtaacatgaaccttgacgacaaatcgctgtttcttgacgccatggaagatgtccagccgctgaaacgtgctaccgatgtccactggcatccaacgcgtaaccaacgtgcgccgcagcgtatcgacacgctgcagcttgataatttcctcaccaccggatttctcgacatcatcccactaagtcagccgctggagtttcggcgggaagggttgcaacatggggtgctggataagctgcgcagtggtaaatatccgcaacaggcgagcctgaatcttttgcgccagccggtggaagagtgccgcaaaatgatgttcagtttcattcaacaagccatggctgatggtttgcgtaacgtgctgattattcatggcaaaggacgggatgataaatcgcatgccaatattgtccgcagctatgtggcgcgctggctgaccgaatttgatgatgttcaggcatattgcaccgcgctaccgcatcatggcggcagcggggcgtgttacgtcgcactacgtaaaacggcgcaggcgaagcaagaaaactgggagcgccacgctaagcgcagtcgttgatctcgagacgcatccgcggcttatgccgccagcacgcggttgcgaccatcatttttcgcccgatacaaagcatcatcaacgcgtttaaacagttcatcgatgctttcatttccttcgtgatgcgccacaccaatgctgacggtaaagcgtggtaagcccgaaatactcacttttgccacgcttacgcggatagtttcagccagcgaaagcgcggtatccagtggggttcttggtagcaataagacaaactcttcgcctccccaacgaaacaccaaatcgcctttgcgagcgcaactttcgagggtgcgggcgagggcgcataacacctcatcacctttagaatgcccatagagatcgttaatgtgtttaaaacgatcggtgtcgatgagcaacaagctgtaatcctgagcgatggcgagatgctgcatttggcctggttccgtaatgtgataaaactgtcgccgattcagtaatccggtcatcgcgtcatggtgagcagcatgttccagctgctcctccagccgtttttgctcagtaatatcatgcacaatacataacatgagcttgtcgccataaatttcaatcggtccggcataggtctgcacatgacgagtagatccatccgccagtttatgaacaaaattcaaaggtttatgaccgccgggtaaatgcgaaatttcatgcatgataggcatgacgcgacgcccgagcatatttatttcccaggtatgtttctggcacatcgtttcatggttataaccatagaaattgagcgcggcgaggttagcatcgacgatttgtccatctcgtgacgggtcaatcaacaacattggtgcagagttagtcagaaaaaagcgcgcataaaaaccttgttttttgcgctgataatttgccgagcgactggcttttaaccccagcgttgccggcgcttcgataccttcgaaaataatcaccggttctgtttctgtcagctctcgcaaaacaagccgacagcttaatgctgtttcctcttctttacgctgaacagtgaggatttcgataatatcgtgttggttttgcagatcggagaggtatttcggcagttctttttgtgaggagacggaatagggaccggttcgtagctgactaaacgtgaggtcttgcatcaacagtcgcgccgcgctattggcataaattaactgttcctcaaagggcgaaacgatccagacaggactggtgagtaagtccagggtattgaagttgtgcgtaatcattgagatcccattatttttatcaatttttgttgctatccgatcgcaaaaaagccacgtcatatgatcagataattctgataatgatagacgctatttaacacttcacacggtttgtatacggaaaagcattttgctttttgtattcaatttagacagaattttattaatcatttcagggtaatggggtgatgagatgttgcgtaacagggccagaaggctagactacaaaataatgcgttgatgatggaggcactgtggaagcgattaagggatcggacgttaatgtcccggatgcagtatttgcctggatgctggatggtagaggcggcgttaaaccgctggaaaatacagatgtgattgatgaagcgcatccctgctggctccaccttaattatgtacaccatgatagcgcccaatggctggcgacaacaccgctgcttcccaataacgtacgtgatgcgctggcgggcgagagcacacggccccgagtcagccgtctcggtgaaggcacgcttattacattgcgctgtataaacggcagcaccgatgaacgccccgatcaactggtcgccatgcgtgtatatatggacgggcggttaattgtttcgacccgacaacgcaaagtgctggcgctggacgatgtggtgagcgatctggaagagggcacgggtccgaccgattgcggagggtggctggtggatgtgtgcgatgcgttgaccgatcattccagcgaatttatcgagcagctgcacgataaaattatcgaccttgaagataatctccttgatcagcaaattccaccgcgtggattcctggctctgctgcgcaaacaattaatcgtgatgcgtcgctatatggcaccgcaacgtgatgtttatgctcgtcttgccagtgaacgtttgccgtggatgagcgatgaccaacgccgtcggatgcaggatattgccgatcgccttgggcgcggtcttgacgaaatcgacgcctgtatagcacggactggcgtgatggcggatgaaatcgctcaggtgatgcaggaaaatttagctcgtcgtacctatacaatgtcattgatggcaatggtctttttacccagtacctttctgacagggttatttggcgtcaaccttggtgggatccctggcggcgggtggcaattcggattttcaattttttgtattctgttagttgttcttattggtggtgttgctttatggttgcaccgtagtaaatggttgtaacaaaagcaatttttccggctgtctgtatacaaaaacgccgcaaagtttgagcgaagtcaataaactctctacccattcagggcaatatctcccttgcaggtgaatgcaacgtcaagcgatgggcgttgcgctccatattgtcttacttccttttttgaattactgcatagcacaattgattcgtacgacgccgactttgatgagtcggcttttttttgcctgttatttatcagcgtctaccctttaagagtccacccaatgaccggagggaaatatgacgacacttatttatttgcaaattcctgtccctgaaccgattcctggcgatcctgttccagtgcccgatccgatccctcgcccgcaacccatgcctgacccaccacctgatgaagaaccgattaaattgtcgcatcgtgagcgtagatctgcgaggatacgcgcctgctaactttgcgtcgatgaccacgagaatagattgtgaccgctttttctaccctgaatgttttgcctcccgcccaactcacgaaccttaatgagttgggttatttaaccatgacgccggtgcaggccgccgcgcttccggcgatccttgccggaaaagatgttcgcgtgcaggcgaaaaccggcagcggcaaaacggcggcttttggcctcggcttgttacagcaaattgatgcgtcgctatttcaaacccaggctttagtgctgtgtcctacgcgtgaactggcggatcaggtggcaggtgaattgcgtcggctggcgcgttttctcccaaataccaaaattttgacgttgtgcggtggtcaaccgttcggtatgcagcgtgattcgttgcaacatgcgccgcatattatcgtggcaacgccgggtcgtttgctggctcacttgcaaaaaggcacgatatcactggatgcgctgaatactttggtgatggatgaggccgaccgcatgctggatatgggatttagcgatgccattgatgatgtcatccgttttgcgccagcatctcgacagacgcttctgttttctgcaacctggccggaagccatcgccgcaatcagcggacgagtgcaacgcgatcctttggcgattgaaattgactcaacagatgctttgccacccattgaacaacaattttatgagacatccagtaaaggcaaaattcctctgttgcaacggttattaagcttgcatcagccatcctcttgtgtggtgttttgcaataccaaaaaagattgccaggctgtctgcgacgcgctgaatgaagtagggcaaagtgcattgtcgttacacggcgatctggaacaacgcgatcgcgatcagaccctggtacgttttgctaacggtagcgcccgtgtactggttgcgactgatgttgctgcgcgtggtctggatattaaatcgcttgagctggtggtgaactttgagctggcgtgggaccctgaagttcatgtacatcgcatcggtcgtacagctcgtgcaggaaatagcggtctggcgatcagtttctgtgctccggaagaagcacagcgggccaatatcatttctgacatgttgcagataaaacttaactggcaaacgccgccagctaatagttccattttgccgctggaagcagaaatggcaacgttgtgtatcgatggcgggaaaaaagccaaaatgcgcccgggtgatgtattaggtgcgctgacaggagacatcgggcttgatggcgtagatattggcaaaatcgccgtgcatccggcgcatgtctatgtcgcggtgcgtcaggctgttgctcataaagcatggaaacagttacagggcgggaagattaaaggaaaaacgtgccgggtgcggttattaaaataatgaaatgttgaattgccgggtgcaagagtaaacatcttatgcgggattgccggatgcgacgctggccgcgtcttatccggcctccataagagtagcccgatacgcttgcgcatcgggcgctatcctggttatttcacttcaaccacattcagccgtaactcatccaactgattttcatcttcttctggctgccagcccaccggttgtagtgggatctcttcgcgatcaaacgccagatcacccccgttaaccacttcagaaccgtgggtaatgcctttgaaatcgaacaggttggtatcgcacagatgcgacggcaccacattctgcatcgcgctgaacatcgtctcgatacgccctggataacgtttatcccagtcacgcaacatgtcagcaatcacctgacgttgcaggttaggctgtgaaccgcacaggttgcacggaataatcgggaacgcttttgcatcggcaaatcgctgaatatctttctcgcggcagtaggccagcggacgaataacgatatgtttgccatcatcgctcatcagtttcggaggcatacctttcatcttgccgccgtagaacatatttaagaacaacgtttgcaggatatcgtcacgatggtgacccaacgcgatcttcgtcgcccccagttccgttgcggtacgataaaggataccgcgacgaaggcgagaacacagtgagcaagtggttttgccctctggaatcttctctttcacgataccgtaagtattctcttcaacaatcttgtactcaacgcccagcttttcaagatactcgggcagaacgtgttccgggaagcccggttgcttttgatcgaggttaacagccaccagcgaaaaattgattggcgcgctttgctgcaaattgcgcagaatctccagcatggtatagctgtctttacccccggagaggcaaaccatgatgcgatcgccttcttcaatcatattgaagtcagcaatggcttcgcccacgttacgacgcagacgtttttgtaatttgttcaggttgtattgttctttcttactaatttcttgattttgcgacatttaaaagcgactcaattcgttatatggcatcagaagagtatgcgtcatgccggaacgcccagcataagaaatctgatataaaaactgtggcgtgtatggtacggattagaggggaaaatgtcagcacatttgcgaaatgaatcaaaaagcccgcagcaatgtgcgggcgttagtgtcagcgcacaaccagcacggagcactctgcgtgacgcactacagctgcggcgttggaaccgagcagataagtggtgatatccggtcgatgggaagcaatgatgatcatatgagcggggatcttcttcgccatttccagaatgcggtctttgggcgagccttcctcaacatggacatgcactctgtcggttggcagtttaaattttttaatgatctcttccagttgcgatttggcttccgctttcaggtcatccattgccggtaattctgcggaatacgctaaacccagagaggcatagtagggcagtgaaggtattaccgtcaggaaatgaacctctgcatcatcaatctttgcctctgcctcaacgtggctaatcacgcgttgagttaattctgaatcggaaatatcgatagggacaagaatcgttctgttcataaaacctcctgttttagtatccgcataaagtgtaacgccagatgacactttttgtgtaatgacggagttcacatttttaatttagatcaaaggaggaagaataagcagaaaaagcccgccataacagcgggcaggaggatttagaactgataaaccagacctaaagcgacaatatcatcggtagagatgccattggcagcgtagaaactgtcatcttcatccaacaggttgattttatagtcaacataagtggacatgtttttattgaaatagtaagtcgcgccaacatcggcgtatttaaccagatctttatcatcaacacctgccgggttgtctgcaccaccggcagcgtgcaggtcacggcctttagacatcaggaaagagactgccggacgcagaccaaaatcaaactggtactgtgcagtgacttcaaagttctgggttttgtttgcaacagcataatcgctgtcgccaaacggggtcatattacgcgtttctgaatacatggttgccaggtaaatattgttagcatcgtattttagcccagcagtccacgcgtctgctttatcaccacccgccgcagtatggttaacctgatcattggtgcggtcagaagaggtgtatgccgcaccagcgctaaagcccatgcctaaatcatatgttgtggaaagaccccagccgtcaccgttttcatggcgaacatcacgtccgttgttggtgccttcctgaccattactggcaccttcgttgttaccttgatactgcaccgcgaagttcagaccatttaccagaccgaagaaatcagtattacgataagtcgcgacgccattggctcgaccagtcataaagttgtctgcattggtataagagtcaccgccaaattcaggcagcatatcggtccagccttcgatgtcgtacattacgccataattacgtccgtaatcgaaagaaccgtaatctgcaaatttcagcccggcaaatgccagacgggtccatgactggttttttgaagattcagtgttgtttgcctgaatattgtattcccattgaccgtagccagtgagttgatcgttaatttgggtttcgcctttaaaacccagacgcgcatagctctggtcgccatctttcgccgaattatcagaaaaataatgcaggccatcaactttgccatacagatctaatttgttgccgtctttattataaacttcggctgcatgtgcagcacctgcggcgagcagggcaggaattaaaagtgccagtactttgcttttcattgaataaatcctttagttattttatttgccttttatccccatttcggggagtgaaaacatcctaaaggagaagttcagttagccgataaatatcatttgttacgccttaagtaaaaccttaatcaaataattcctctgaaatgataataagtttggtgaatgtatcgaagataatacatacaaaataaaaattatacttttaattttctatacgttattctgcgcgggttatatgcctttattgtcacagattttattttctgttgggccattgcattgccactgattttccaacatataaaaagacaagcccgaacagtcgtccgggctttttttttagaattggataatccttatccagagcatttaatcggtgttgcttttttccgcttttccggccatttgtgccaggaagtcatagcgtttttgcaaatcagctgcagcatctttccataactgttctgccacttctggctgctgcgaattcagacgacggaaacgttgctcgtgaagtaacgtttcttccagtgcttctgacggcgggcgtgaatccagcgccagcggcagtttgccttcatcggcacgacgaggatcgaagcgatatagcggccagaagccggtagctgtgagttggcgcatctggtcatggctgagtgccagatcgtaaccatgctcttcacacgggctataagcaatgatcagcgatggccccggatacgcttccgcttcctgaatcgctttcaccgtctggttcagctgcgcgccgagagaaatctgcgccacataaacatgaccgtacatcatcatactgacgccaagatctttacgcgctttacgtttgccgtgctcgccgaacttagttactgcacccagcggtgtcgctttcgacgcctgaccaccggtgttggaatagcattgcgtatccagcaccagaatgttgacgttttccgtcaaactcaatacatgatccagacccccaaagccgatatcgtaagcccagccgtcgccaccaatcagccagattgatttttccaccagtgcatctgcgtcacgcagcagttcatgtgcttcggcaacatcgttgagttgctggcgtaaagctgcgacctgttctcgacgaacctctggcgtagcgtctgatttcaacgctgtcagtaattccgccgggattttatcggcaaattgatccagcagacgcagcacgcggacacggtgttgatcgaccgtcaggcggaaaccaaggccaaattcggcattatcttcaaatagagagttcgcccatgccggcccacgaccgttggcatcggtggtatacggtgtagagggcaggttaccgccataaattgaagaacagccggtggcgttagcgatcaacatccggtcgccatagagctgagtcagcaatttaatatacggcgtctcgccacaaccggagcaagcacctgaatattcaaacagcggtgtaatcagctgcgatgtacgaatatcaatacgttccagtttgctacggtcgatttctggcaggttgaggaagaaatcgtaattgattttctcttcttcgacatgttccaggcgagacatcatattgatggctttaatctctggattctgacggtctttcgccgggcaaacttcgacgcacaggttacaaccggtgcaatcttccggtgccacctgcaagacatatttctgcccgcgcatatcacgcgatttcacatccagcgaatgcaggctggcaggggcgttttccatcgcttcaggcggcaccacttttgcgcgaatagctgagtgtgggcaagcggcaacgcagtggttacattgggtacagagttcctctttccagatggggatctcttcggcgatattgcgtttttcccagcgagtggtgcccatcggccaggtgccgtctggcggcagcgccgaaacggggagggcatcaccaagccctgcgagcatcgctgcggttacggttttcacgaaatcaggggcggcatcggaaaccactggcggtcgattggcgctgtgcggatttaccggttgcaacggaacttcttctacggattcacgcgccagcgccagagcctgccagttgcgttccaccagatcctggcctttgctactgtaacttttggcaatcgcaccctgcaattctgcgagggcgctatcgccaggcagaatttgcgtcagatggaaaaaagccatctgcatgacggtattaatacgggccgccaggccacattcgcgggcgattttcgccgcgttaatcacatagaagcgcgcttttttctgatttagcacggcctgaacttcctgcggcaagcgcgaccacacttcatctgcgctgtacggcgtgttgagcaggaaaatgccgccaggttttaaacgctcagccatctgatatttatcgataaactgcaactggtggcagccaacaaaatcagcctgggaaatgagataagcggaacgaatcggctgttcgctcacgcgaaggtgagaaaccgtcaggccgcccgcctttttggagtcgtaaacaaaatagccctgtgcgtaccacggcgtggaattaccgataatcttgatattgtttttggtcgcggaaacgctgccatcactaccaaggccataaaacaaggcttccagtttcgccgagtttggcagggtgttttccggcaacggcagtgacagattggtcacatcatcgtaaataccaaccgtaaagcgcgctttcggtttagccgcgttgagctcggcaaataccgccagtacacagtccgggccaaattctttggatgaaagaccatagcgcccaccaatgacacggggcagagtttcgcgctcgccattattaaaggcttctgccagtgcggtcattacatccagatagagcggttctgcctgggcaccgggttctttggttctgtccagtaccgccacgctgcgtacggatcccggcagagcttgcagcaagtgtttggcggagaagggacggtacaggcgaactttcagcacgccaactttttcgccacgggttagcaattcatcaaccacttcttcacaggtgccaatggcagagcccatcaggataatcacccgttccgcttgcggatgcccgtaatattcaaacggctgatactgacgacctgtcgcggcagagaaatcattcatcgcctgttcaacatggtcatagaccgcgttgtaccatgggttggtggcttcgcgagactggaaataagtgtcaggattggcggacgtaccgcggatcaccggatgttccgggttgagtgcccgggcgcgatgagcatcaatttcgacctgcggcatgagatcaagaatcgtgtcatcggccagcgggacaattttattgatttcgtgggacgtgcggaaaccatcaaagaaatgaataaatggcacgcggcttttcagcgtcgcgatttgcgaaatgagagcaaagtcttgcgcttcctggacgtttgctgcacacaacatcgcgcaacccgtctggcgcaccgccataacgtcggaatgatcgccaaaaatagagagtgcatgtgtggcaacggtacgtgccgctacatgcaggacaaacggtgttagttcgcctgccagtttgtacagcgtcgggatcatcagcagcaaaccctgcgatgacgtaaacgatgttgaaagggcacccgtctgcaaagcgccatgcacggtagcgatagcacccgcttccgactgcatttcaaccacgcgtggtgtgtctccccaaacgttctttaagccgtttccggcccaggcatcagcctgttctgccatcgtggaactgggggtaatagggtagatggcgataacttcactggtgcgaaatgcgaccgaagcaaccgcgccattaccgtcaatagtaatcatatgacacccttacattgcgcaaatgaggggcgcacgaaattgctgcgcgcccagtagtaatctttcaattttagcaaatggctttcttctgcattttcgcttttgtgtcccccacatcagcgtaatgaatgttttgatcaaacagagggcaaaaaaatagccataaaaaagtaaaaatgcggggcaacgcgcaggacagctctcgacgccgccctctgtgctgcctattatttatggcggtgtcgtttggcttgaagatcagaggaagaaaagatgcgagcagcgttttgggtagggtgtgccgctttattgttgtcggcgtgtagtagtgagcctgttcagcaggcgactgcggcgcacgtagcgccaggtttaaaagcgtcgatgtccagtagtggagaagcaaattgtgcaatgatcggcggttcgctttctgttgcccgtcaactggatggtacggcgattgggatgtgtgcattacccaacggcaaacgctgtagtgaacagtcacttgccgccgggagctgtggcagctattaattcattaaatccgccagcttataagttaatgtctgtttcgcggtcgccagcgttaactggttcgcggtcagatccacttgtgcaccttctttcagcatttcgctaatggtgttatcgagttcattaagctgcgggttagcgcacatcatacgggtcattgccagccctttggctgtcagttcaccattagacagtttgccttcaccgctaaagcggttacacatgctgccggaaatcatcattttttcaccaaagctgatttctggcggatttttatcgctggtcacgggcttaccgtttacgctttccagcacaaagcgatgatgctgtaactgttctggcgttacagcaattttgtcactacttacacatcccgccatcagcaggcttagcgcaacaagcgcggctactttcttcattgtggttctcaattacagtttctgactcagggctattttaagaatagaggatgaaaggtctttggggattatctgaataagctcccctggaatgcaggggagcggcaagattaaaccagttcgttcgggcaggtttcgcctttttccagattgcttaagttttgcagcgtagtctgagaaatactggtcagagcttctgctgtcaggaatgcctgatgcccggtaaacagcacgttgtggcaggcagacaggcgacggaatacgtcatcctgaattacgtcgttggatttatcttcaaagaacagatcgcgttcgttctcatatacgtccatacccaacgaaccaattttctgatttttcagcgcttcaattgccgcctgagaatcaatcaatgcaccgcgactggtattgacgatcatcacgccatttttcatctgatcgaaggcggcttcgttcaacagatggtagttttccggtgtcagcgggcagtgcagagagataacgtctgattcagagaacagggttggcagatcgacatactccacaccgagttccagcgccgccgcacttggatacggatcgaacgccagcagacgcataccaaaacctttcagaatgcgcagcatcgccacaccgattttaccggtaccgataacgcctgccgttttgccatacatagtaaagccggtcagaccttccagagagaagttagcgtcacgggtacgctgatacgcgcggtgaatacggcggttcagcgtcatcatcataccgatggcgtgttcagcaacggcctctggatcataggctggaacacggactactttcagccccagttcttttgccgcgtcaaggtcgacgttattgaaaccggcacagcgcagggcgatatatttaacgccgtgctttttcagctcttccagcaccgggcggctgccgtcatcgtttacgaaaatacataccgcttcgcagccattggcagttttagcggttttttccgtcagcagaaagtcaaaaaattccagctcaaagccaaaggactcgttcacctgttgcaggtacttcttgtcgtactgttttgtgctataaacggcgagtttcataagactttctccagtgatgttgaatcacatttaagctactaaaaatattttacaaaatttcaaatataattgaaagctatggcgatattgaaaaattcatcaacaactatgcttagtgtaggcgcaaccttcaactgaacggttaaacatgccacaatacccgtattgaatgcttaatttttcgctaaatcaggatattaactacccatgctgggtaaatataaagccgttctcgcgctgttattactgattattcttgtgccgttgacgctgctgatgacgctcgggctgtgggttcccacgctggcgggcatctggctaccgctcgggacacgtattgcattagatgaaagcccacgcattacgcgtaaaggtttaatcattcccgatctccgttatctggtgggagattgtcagcttgcgcatatcaccaacgccagcctttcacatcccagccgctggttattgaacgtcggcatggtagaacttgattctgcttgtctggcgaaattgccgcagacggagcaatcgccagctgctccaaaaaccctcgcgcagtggcagtccatgctgcctaacacctggatcaatatcgataaactgattttttctccctggcaggaatggcagggaaaactctctctcgcattaacctctgatatccagcaactgcgttatcagggcgaaaaagttaaatttcaaggccagctgaaagggcaacaacttacagtcagcgaactggatgtcgtcgcgtttgaaaatcagccgccggttaaactggtgggggaatttactatgccgctcgtgccggatggacttcctgtaagtgggcatgctactgcgacgttaaacttgccgcaggaaccgtcactggtggatgcagagctggactggcaggaaaatagcgggcaattgattgtgctggcacgggataacggcgatccgttgctcgatttgccgtggcaaattactcgtcaacaattgaccgtaagcgatggtcgctggagttggccgtatgcaggttttcctttgagtggccgactgggtgtcaaagtcgacaactggcaggcagggcttgagaacgctctgatcagcggacgactgagtgtgctgacccaggggcaagcgggtaaaggcaacgcggtgctaaattttggcccaggaaaattaagcatggataacagccagctgcctctgcagctgaccggtgaagcgaaacaggcggacctcattttatatgcccgcttacccgcgcagctaagtggaagtctgactgacccaacgctggcctttgagccaggcgcgttattacgttcgaagggaagagtcatcgattcgctggacatcgatgaaatccgctggcctttagcgggtgtaaaagtcacccaacgtggtgttgacggacgtttgcaggccattttgcaggcgcatgaaaatgaactgggcgatttcgtgctgcatatggatggtctggcgaatgattttctccctgacgctggccgctggcagtggcgctactggggaaaagggagttttacaccgatgaatgccacctgggatgtcgcaggaaaaggtgagtggcatgacagcacgattacgctgaccgatctctccaccggtttcgaccagttacaatacggtacgatgacggtagaaaagccgcgattaattctcgacaagcccgtcgtctgggtacgtgacgcacagcatccctccttcagcggcgcgctgtcactggacgccgggcaaacgctgttcactggcggcagtgtgttaccgccatcaaccttaaaatttagcgtcgatgggcgcgatccgacgtatttcctctttaaaggcgatttacatgctggtgagattggcccggttcgggtaaatggtcgctgggacggtattcgtctgcgcggtaacgcctggtggccaaaacaatcactgactgtattccagccgctggtgccacccgactggaagatgaacttacgcgatggtgaactgtatgctcaggttgcattttctgctgcgccggaacaaggattccgcgcgggagggcacggcgtgttgaaaggcggtagtgcctggatgccagataatcaggttaacggtgtcgattttgtcctgcctttccgttttgccgatggagcctggcatctggggactcgcggccccgttacgttgcgaattgccgaagtgattaatctggtgacagcgaaaaatattacggctgatttgcaagggcgttatccgtggactgaagaagaacccttgctgttgactgatgttagcgtcgatgtgttaggcggtaacgtactgatgaaacaattacgtatgccgcaacatgacccggcgctgttgcggctgaataatctctcatccagcgaactggttagcgccgtcaatccgaaacaattcgccatgtccggggcatttagtggtgcattgccattatggctaaacaacgaaaaatggatagtgaaagatggttggctggcaaatagcgggccaatgaccttgcggctggataaagacaccgcagatgcggtggtgaaagacaatatgactgcgggttcagcaattaactggttgcgctatatggaaattagccggtcatcgacaaaaattaacttagataatctcggtttattaaccatgcaggccaacattacaggtaccagtcgcgttgatggtaaaagcggtacggtaaaccttaattaccatcatgaagagaatatttttacgctgtggcgcagtttacgctttggcgataatctccaggcatggttggagcagaacgcacgtctgccgggaaatgactgtccgcaaggaaaagagtgtgaggaaaaacaatgaaaattttactggctgcgttgacgtcatcttttatgctggttggctgtacgcctcgcattgaagtcgctgcacctaaggaaccgatcactatcaatatgaacgttaaaattgagcatgagatcatcatcaaggcagacaaagatgtcgaagagctgcttgaaactcgtagcgatcttttctgaggcgatgatgaagaaaacattacttctttgtgcgtttcttgttgggctggtaagcagcaatgtaatggcattgactctggatgaagccagaactcaggggcgggtaggtgaaacattttatggttatctggttgcgctgaaaacggatgctgaaacagagaaattagtaaccgacattaatgccgaacgtaaagcgagttaccaacaactggcaaagcaaaataatgtgtcggtagatgatatcgcgaaactcgccgggcaaaagctcgtagctcgggccaaaccgggggaatatgtacaagggataaacggtaaatgggtgcgaaaattttaatagcaaaaccgcaatatcgggataatgctacaggagaaagcgattgatctattttcctgaaacaaggtgaatattaaaaaactcctgttaaattgccttttgccctgaaaaatgcatagtcaaatatctgttttaactaattggcgttgcagtacatgcaacgcgaattagttagcggaatttacgccgatactcgcctggcgtcatcccaaagcgttgcttaaatactgttgaaaaatgactctggtcggaaaatccccaatgaaaaccaatgcctgccagtttttcatcatctgcggcatggcgaatcgcatcagcacaaaaatcgagacgacggttacgaatatattgcgcgaccaccaaacctttatcggcaaacattcggtacaaactacgtactgacatacctgtctctccggctatccactccgggcgtaatatctcttcgcgaatattatcgtctatcagcgtaaccactttttgaaactgacgttcacggcgaggttgaacagattcccgctgatgaagtaccgggcgcagcagacacaccatcgcctgtagcgcagcttcactttctgtttcagaaagtgccgggttattcatgctctcctgtaacaggcgatgactgagttgcaccatgggtaagtcagcgtccagtctttctgcgcagacaggtttttgatggggaaaatattgttccagcagagtgcgtggtaaaagtaatgaaatctgtttagaagactcctgccagtaaagcgaacaggggcgtgaggcatcgagtaacgtaatatcgccagcgccaatctgcacctgacgctcatcctgctccattattgcctgaccactaagctgaaaaacggtgtaaaaccaggcatcgtcgctgccttttatttcctgccaggtgcggtataaattcactccgttggttgtcacggtgctcagctttagtcctttggcaaaatgcgtttccagtacacccgtgtaacgctcagtcagcaggcgtccggtaaaatttccgcatacctgattgatttgggaaagccattgctgaaactcattatccactgcggggttcatggcacgttttcgctctgtgaaatgtatttttattgttgcatttgtgttgcaataaacgaagctaatgagcctgactataggaaataagtcttgtcaggcatagagacataagcggttattgtcacgatttgcggagcttgtcacagctgacaaagcgaatgtcacagcgaaaaaagtgacttttcttgtcgctgcgtacactgaaatcacactgggtaaataataaggaaaagtgatgacagagccgcatgtagcagtattaagccaggtccaacagtttctcgatcgtcaacacggtctttatattgatggtcgtccaggccccgcacaaagtgaaaaacggttggcgatctttgatccggccaccgggcaagaaattgcgtctactgctgatgccaacgaagcggatgtagataacgcagtcatgtctgcctggcgggcctttgtctcgcgtcgctgggccgggcgattacccgcagagcgtgaacgtattctgctacgttttgccgatctggtggaacagcacagtgaggagctggcgcaactggaaaccctggagcaaggcaagtcaattgccatttcccgtgcttttgaagtgggctgtacgctgaactggatgcgttataccgccgggttaacgaccaaaatcgcgggtaaaacgctggacttgtcgattcccttaccccagggggcgcgttatcaggcctggacgcgtaaagagccggttggcgtagtggcgggaattgtgccatggaactttccgttgatgattggtatgtggaaggtgatgccagcactggcagcaggctgttcaatcgtgattaagccttcggaaaccacgccactgacgatgttgcgcgtggcggaactggccagcgaggctggtatccctgatggcgtttttaatgtggtcaccgggtcaggtgctgtatgcggcgcggccctgacgtcacatcctcatgttgcgaaaatcagttttaccggttcaaccgcgacgggaaaaggtattgccagaactgctgctgatcacttaacgcgtgtaacgctggaactgggcggtaaaaacccggcaattgtattaaaagatgctgatccgcaatgggttattgaaggcttgatgaccggaagcttcctgaatcaagggcaagtatgcgccgccagttcgcgaatttatattgaagcgccgttgtttgacacgctggttagtggatttgagcaggcggtaaaatcgttgcaagtgggaccggggatgtcacctgttgcacagattaaccctgtggtttctcgtgcgcactgcgacaaagtgtgttcattcctcgacgatgcgcaggcacagcaagcagagctgattcgcgggtcgaatggaccagccggagaggggtattatgttgcgccaacgctggtggtaaatcccgatgctaaattgcgtttaactcgtgaagaggtgtttggtccggtggtaaacctggtgcgagtagcggatggagaagaggcgttacaactggcaaacgacacggaatatggcttaactgccagtgtctggacgcaaaatctctcccaggctctggaatatagcgatcgtttacaggcaggtacggtgtgggtaaacagccataccttaattgacgctaacttaccgtttggtgggatgaagcagtcaggaacgggccgtgattttggccccgactggctggacggttggtgtgaaactaagtcggtgtgtgtacggtattaatctggttcgctcataagtaaaaaacggcacctggtgccgtttttttgtctgaaacaatcacttatctttcttcagcgcccctagcgttggcgtttcgtcaaagaagttccatggtttaagcagagtatgtacccattcggtcggcataatcggccactcttcggcacgggccacatgtgtggtgccggtggtcatccagataacagcgtcggtgttgtccagcgactcgttatccttactgtattgtccaagaccggtgtcatgagtggaacggttcggatatttgccttccgggaaacgctcgccagggtgataacgcgttacccagagctgcttgtccataaagcttaaacgatgatagatccactcgtccggcgcgaactgggcaccttttgctaccgggtgagtaccacctgcataaggaataatttgataggaaactggattgcccatgcgattctctttgttcaggttactcaacagacgaatcgtgcccggatcaaacttctgcgcggcatcctgttcattgccgatgttgtactgattaacttgcatggtactggtgcgtgggccaccggcagtattcggttttaccactgggtccatcgccaccaggctgttattctcgccatctacatccagatcgaggcggaaattataaatatgttggtgtgtagtacccacgatattgtgatcgataagcgtgccgtagcgcgtgtcatctttcgccgtctcatcgtgcatggttttcgctttaacacctttcaccgcttcgatgcccgtagcaccggcatcaatgccaatagtgccgttttcatggaagatccagtcaaaaatgtagtcatagttacccactgtactgatccagcgcaccactaactcccggcgttcggtactgacgttgggctggcccatttcctgatgcttatactcaggcccggcataacgttcaaataccgcgatagcgcgagggatctccatcggcacgccagtgtagtcggcgatggtttcattaaggagcactgcgttagacggggcatctttaccacgagcaattggtgaggttagcgtgcccataccgtagtcaccagagtccagatacgctttaaagtaccagccaatatcaggatcaccgtaaggcacaatcatgccgccgagagaaccttcgtacatgactttgcgtttggtgccattgtcgttataagtcacggtggagatcataggtccgacgcgcgagttcatgctgaggtgaaaatcccagttccgccagtgaatcatatcgccagtaatggtgtaatttttaccttcaggctcaatgatttgcataggcttaactgccggagcaacgcggtcacggccatcaaatgggcgtgcggtcattggcaccggaactaccgcaccttcttcaatcttaacgatttttttctgttctaaatcaacgaccgccaccaggttttcgatgggatgtgcccagtagttgccatcaccgacatcaagatagctgatgactttgagcaaccgggcatcttgtttcaggccatctttaccatcgaaataacctacggtcagcggcgtggtaatcactttcttcgcatcagtaataccgcgcttcttcacggcagcggcaaattcttcactgttgttaataatgttctgcacactggcgaaatcatccagcaacaccataccgtgggcgtctttaatgggttgccaggagagcagtttgttgttttgcagatccaccaccgcttcgatgatatgtttgccgtcgagcataatgacgtcggctttgcgcggctggtcaaccggtttgttttccagcgcaaacgcccagacagcttctttatctggcggtagcagggagatctcagtaaaacgggtattgggtttgaagtccgcggaagctttaacaatttcaacggcctgtttaatttcgtccgcagttagcgcattaagtgggtgagggcgcttttctacctgaaaggtttgatccagcccggactggaaaacatcgttaataaaggtgtcagaaacccaggccttattgtctttcatcactaccggtacttgcagtgccagaggctgaccattaacaattgctgtttgcgcaccaggcttcactttcacgtacgcgccatctttaatcagggtaaagatctgggcgtagtcgtcccactgcacatcggcaccaaattctttaagcgtttcatccattggcaccatatgcgcttcaccaccgtgggcaaataccggcgcttgccaggcgaaacttaaggcgactgccaacgccagggttgttttacgggcagaatacagagaggggcttcccattattaacctcgtcagatgttgtgttcttgttagcaaccgcgctctgtgggcggtttagtcaggttcacattatcagtactgatgcaaaggggattgcctgcacctgccaggttgtttggcaggtgtgccagcttttcatacagtgggtgccctgaaaatagatgtacacatcatgcataatgtgacaacgtcacaaaacttagtgaaataaaagggcaactattggccgttgcccttcattcaccgattaatcgacaaaatcaccgtgctgcctggccaccagcgtcagaattgaatacagcgccaccggggtttgatgctgattgaatacctctaccgcccattccaccacacctgttggtttttcttctgcgctacgctgttttttcagcgtcttgcgcttacaggtgagacgcacctggatggtatcgcctggctttacgggttcgataaaacgcaagctttccagcccgtagttagcaatgaccggaccaacaccggcatcgacaaacagacccgcagccgcagaaagcacaaaatacccatgcaccacccgctcaccgaaaatagattcggcagcagcaatcttatccatatgtgcatagaaatgatcgccgctgaggcaagcaaagttaacaatatcggcctctgtcattgtgcggcggggagtcaacaggctgtcgcctggttgtagctcctcaaaatatttgcggaacggatgaatacgatcttcttcgactttcgcaccgcgcacccactgtttgctgatagctgcaagcatcgtcggactaccctgaacagcggttcgctgcatgtaatgtttcaccgctcgtaaaccacctaattcttcaccgcctcctgcgcgaccaggcccaccatgtaccagttgtggcagtggggagccatgcccggtggattcttttgccgactcttcattgaggatctgaattcgcccatgcgtacgtgccgcgtcggcaataaactgacgcgcaatttgcggatcagccgtcaccagcgttcccgcaaggctaccgccgcctgcacaagccagttgcagagcatgttgctggttttgtgctggcattagcgttgcgacagggccaaaggcttctgttgcatgtaccgccggtgtttcatccggctgcggacagtacaataaggttggcgggaagaaggcacccgcagcagataaatccgcctgaccaccgaggcgaatctcgcatcctgcagccagcaatatgttcactttttcctgcacatcggcacgctgctcagcatttaccagtgcgcccattttcacgccttcctgagcaggatcaccgaccacgactttctgtaatcgcgcaaccagagcatcactgacagcattaaccaatgcctgcggcacaataatccgccggattgccgtacatttttgcccggcttttgtggtcatctcacgcacaacttcacgaataaacagcgcaaactccggttgatccggggtgacatcttcgcccagtacgcagcagttcagggaatcagcttccatagtgaaggggatagatttggcgacgatatttggctgaactcgcagcatctgtccggtcgccgctgaccccgtgaaagtcaccacatcctggctgtccagatgatccaacaagtcgccagcactaccgcagatcagactaattgcgccttcgggaacaagaccactatcgacaattgatttcaccatcgcctgagtcagttgggccgtcgcggtagctggtttgatgatggctggcattccgcccagccacgttggtgccagcttttccagcattccccagcaggggaagttaaaggcgttaatatgcactgccacgcctgactttgaggtcagtacatggcgcgcggcaaatccaccttctttcgataaggggatcaattcatcttccggccacagcgtatcgtcaggcagctcccggctaccgaggctggcgtaagtaaataacgtcccaatgccaccttcaatatcaacccaactgtctgcccgcgttgcgcctgtttgcgcagaaagagcatagaagcgctctttttcactcagcagatgtttagcgaccgctttaagcatcgccgcacgttcgataaaggtcatcgcgcggagggcgggggcacctttttcaatggcaaactggcgggcagccgccatatcaagaccttcactggtcacttcccataacgcctcgccgctaatagcgtggtgaatcaaacggctacggccccggccagactgccaggtaccggataagaaactggctaactgctgcatcgctactctccagatgtttcacatttctgttgctaatagttaaatcgcgaatcataaaaagcaaggggtcttttaacgaaatgttaactatgcgatctgtatagcaactgcggaaaacattaattcactgataaataatgatttataaaaatagggtgcgaaatccgtcacagttcaaacatacaaaatttgtgattttagttaaccattgtgtaactttcataaaacaacgtgattcgtgtttttaattaattcacgaaaactggaatcgtaaaggtgatgacgtgacccaagaagaacgctttgagcaacggatagcccaggaaacggctatcgagccgcaggactggatgcccgatgcttaccgaaagacactgatccgccagattgggcagcatgcgcactccgagattgttggtatgttgcctgaaggtaactggatcactcgcgcaccaaccttgcggcgtaaagccattctgttggccaaagtgcaggatgaagccggtcatggtctgtatctctatagcgccgccgaaacactgggctgcgccagagaagacatctaccaaaaaatgctcgacggacggatgaaatattcctccatctttaattatccgacattgagttgggctgatatcggtgttatcggctggctggtggatggcgcagcgatcgtcaatcaggtggcgttatgccgaacttcttatggcccgtatgccagagcaatggtgaaaatctgcaaagaagagagttttcaccagcgtcaggggtttgaagcctgcatggcactggcgcagggcagcgaagctcaaaagcagatgttgcaagacgccattaaccgtttctggtggccagccttaatgatgttcgggccaaacgatgataactcgccaaacagcgccagaagtctcgcctggaaaatcaaacgtttcaccaacgacgaactccgccagcgtttcgtggacaacaccgttccacaggttgaaatgctcggtatgaccgttcctgacccggatctgcattttgacactgaaagcggtcactaccgctttggtgagatcgactggcaggagtttaacgaagtaattaacggtcgcggaatttgtaatcaggagaggctcgacgccaaacgtaaagcctgggaagaaggtacctgggtacgggaagcagcgctggcccatgcacaaaaacaacttgcccgtaaggtcgcataaggagattcaaaatgagtaatgtttactggccgttatacgaagttttcgtgcgtggcaaacagggcttatcacaccgccatgttggcagtttacatgctgccgatgagcggatggcactggaaaatgcccgtgatgcttacacccgtcgtagcgaaggatgttcaatttgggtggtgaaggcgagtgaaattgttgcctcgcaaccggaagaacgcggtgaattttttgatccggctgaaagcaaggtctatcgccatccaacgttttacaccatccctgatggcattgagcacatgtgaggtcggaaatgaatcagttaacggcttacaccttgcgcctgggcgataactgtctggtgctctcccagcggttgggggaatggtgcggtcacgcaccggaactggaaatcgatctcgcactggcaaacattggcctcgatttattaggtcaggcacgtaacttcttatcgtatgccgctgaattagcgggagaaggtgatgaagataccctggccttcacccgagacgagcgccagttcagcaacttattgttggttgaacaaccaaacggcaattttgccgacaccattgcacgccagtatttcatcgatgcatggcatgtggcgctctttacccgtctgatggaaagccgtgatccgcaactggcggcgatttctgccaaagcaattaaagaagcgcgttatcacctgcgttttagtcgtggctggctggagcgactgggcaatggtactgacgtatcagggcaaaagatgcagcaggccatcgacaagttgtggcgttttactgccgaactgttcgatgccgacgagattgatattgcactgagtgaagagggtattgcggttgatccacgcactttacgcgcagcgtgggaagccgaagtttttgccggaatcaacgaagccacattgaacgtaccgcaagagcaggcgtatcgcactggcggtaaaaaaggactgcataccgaacaccttggacccatgctggcagaaatgcagtatctccagcgtgtcttgcccggtcagcaatggtaacagaggagatgggtatgcaacgtctggccaccattgcaccgccacaggttcatgagatatgggcgctactcagccagatcccggacccggagatcccggtgctgaccattaccgatttaggcatggtgcgtaatgtgacacagatgggagaaggatgggtgatcggctttacgccgacttattccggttgtccggcaacggaacatttgattggcgcgatacgtgaggcaatgacaacccacgggtttacccccgttcaggttgtgctgcaactcgacccggcatggaccaccgactggatgacccccgatgcccgtgagcgtctgcgacagtatggcattagcccgcccgccggacacagttgccatgcccatttgccgccagaagtacgttgcccgcgctgcgccagcgtccataccacacttatcagtgaatttggttccacggcctgcaaagcattgtaccgctgcgatagttgccgcgaacctttcgattatttcaaatgtatttgaggatgccatgacaacgtttcattccttaacagtggcaaaagtcgagccggaaacccgtgatgcggtgaccattacctttgcggtgccccagcctttgcaggaggcgtatcgctttcgccccggtcaacatttgaccttaaaagccagtcttgatggtgaagaattacgccgttgttactccatttgccgcagctacctgcctggcgaaattagtgtggcggtgaaagccattgaaggcggacgtttctcccgctatgcccgcgaacacatccgccagggtatgacgctggaggtcatggtgccgcaggggcatttcggctatcagccacaggccgaacgccagggccgctatctggctattgcagcaggatcaggtattacgccaatgctggcgattatcgccaccactttacaaaccgagcctgaaagtcagttcaccctgatctacggtaaccgtaccagccagagcatgatgtttcgccaggcactggcagacctgaaagacaaatatcctcagcgtttacagttgttgtgcattttcagtcaggaaaccctcgacagcgatctgcttcacgggcgtattgacggtgaaaaattacagtcacttggggcctcgctcattaattttcgtctttatgatgaggcatttatttgtggtccggcggcgatgatggatgagacggaagccgccttaaaagcactgggaatgccagataaaaccattcatctggagcggtttaatacgcctggcacgcgcgtcaaacgtagcgttaacgtgcaaagtgacggacaaaaagtgactgtacgtcaggatgggcgggatcgggaaatcgtgcttaatgccgacgatgaaagcattctcgatgcggcattgcgccagggggctgatctgccctatgcctgcaaaggcggcgtctgtgcgacctgcaaatgcaaagtgctgcgtggcaaagtggcgatggaaaccaattacagtctggaaccggatgaactggccgcaggttatgtgttgagttgccaggcactgccgctgaccagcgatgtggtggttgactttgacgcgaaggggatggcatgagcgaactgatcgtcagccgtcagcaacgagtattgttgctgacccttaaccgtcccgccgcacgtaatgcgctaaataatgccctgctgatgcaactggtaaatgaactggaagctgcggctaccgataccagcatttcggtctgtgtgattaccggtaatgcacgcttttttgccgctggggccgatctcaacgaaatggcagaaaaagatctcgcggccaccttaaacgatacacgtccgcagctatgggcgcgattgcaggcctttaataaaccacttatcgcagccgtcaatggttacgcgcttggggcgggttgcgaactggcattgttgtgcgatgtggtggttgccggagagaacgcgcgttttgggttgccggaaatcactctcggcatcatacctggcgcaggcggaacgcaacgtttaatccgtagtgtcggtaaatcgttagccagcaaaatggtgctgagcggagaaagtatcaccgctcagcaagcacagcaggccgggctggttagcgacgtcttccccagcgatttaaccctcgaatacgccttacagctggcatcgaaaatggcacgtcactcgccgctggccttacaagcggcaaagcaagcgctgcgccagtcgcaggaagtggctttgcaagccggacttgcccaggagcgacagttattcaccttgctggcggcaacagaagatcgtcatgaaggcatctctgctttcttacaaaaacgctcgcctgactttaaaggacgctaatgatggaattcatcctcagtcatgtagaaaagggcgtgatgacactaacgctcaaccgcccggaacgcctgaacagttttaatgatgagatgcacgcacaactcgcagagagcctgaaacaggccgagcgcgacgacactatccgttgcctgttacttacaggtgccgggcgcggattttgtgctggtcaggatcttaacgatcgtaatgttgatcccacaggccccgcaccggatttagggatgtcagtggagcgtttctataacccgctggtacgtcgcctggcaaaactgccaaaaccggtgatctgtgcagtcaatggcgtggcggcaggggctggcgcaacactggcactgggatgcgacatcgttattgctgcccgttcagcaaaattcgtcatggcgtttagtaagttaggcttagtacccgattgcggtggaacctggttactgccacgcgttgctgggcgagcgcgcgccatggggctggcactgctggggaatcaactgagtgctgaacaggcgcacgaatgggggatgatctggcaggttgttgatgatgaaacgctggcagataccgcgcaacagctggcgcggcatctggcgacacagccgacatttggtcttggacttatcaagcaagcgataaatagcgctgaaaccaatacgctcgatatgcaactggatctggaacgcgactatcagcgacttgccggacggagcgcagattatcgtgaaggtgtcagtgcgttcctggccaaacgctcaccgcagttcacggggaaatagcatgatgataaatgtgcaaactgtggcagtgattgggagcggcaccatgggggctggcattgctgaagttgccgccagtcatggacatcaggttttactgtatgacatttctgctgaagcgctgacccgcgcaatcgacgggatacacgcgcggctaaattcacgcgtgacgcggggaaaactgaccgctgaaacctgtgaacgcacattgaaacgccttatcccggtgaccgatattcacgcgctggcagcagcgaatctggttattgaagcggcgtctgagcgtctggaagtcaaaaaagcgctctttgcacagctggcggaagtttgcccgccacaaacgctattgaccactaacacttcgtcaatctctataaccgcaattgctgcggaggtaaaaaatcctgaacgtgttgcggggctgcatttttttaacccggcaccggtaatgaagttggtggaggtggtcagtgggctggcaacggcggcggaagttgttgagcagttgtgtgaactaacgttgagttggggtaagcagcctgtgcgctgtcgttcgactcctggatttatcgttaaccgtgttgcgcgtccttattattccgaggcctggcgggcactggaagagcaggttgctgtaccagaagtgattgacgctgcacttcgcgatggcgctggtttcccgatggggccgctggaattaaccgatctgattggtcaggacgtcaattttgctgtcacctgttcggtgtttaacgctttctggcaggagcgtcgttttttaccttcgctggtgcaacaggaactggtgattggtggacggttgggcaagaaaagtgggctgggcgtgtacgactggcgcgcggaacgtgaggcagttgttggcctggaagcggtaagcgacagttttagcccaatgaaagtagaaaagaaaagtgacggtgtcacggaaattgacgatgttttattgattgagacacaaggcgagacggcacaggcgctggcaatacgactggcacgcccggtggtagtggtcgacaaaatggcgggcaaggtggtgaccattgctgcggcagcggtgaacccggactcagcgacccgcaaggccatttattacctgcaacagcagggcaaaacagtgctgcaaattgcagattacccaggaatgctgatttggcgaacggtagcaatgatcatcaatgaagcccttgatgcgctgcaaaaaggcgtggcctctgaacaggatatcgataccgccatgcgtcttggggtgaattatccatatggcccgcttgcctggggagcgcaacttggctggcagcgaatattaaggctccttgaaaatctacaacatcactatggcgaagaacgctatcgcccatgttcattgctgcgccaacgagcgcttctggagagcggttatgagtcataaggcctggcaaaatgcccatgcaatgtatgagaacgatgcctgcgctaaagcgcttggcatcgacattatctcaatggatgaaggctttgctgtagtgaccatgaccgtcactgcacaaatgcttaatggtcatcaaagttgccacggcgggcagctattttcactggctgatactgcctttgcctacgcctgcaatagccaggggctggcagccgtcgcttctgcctgcacgattgattttttgcgtccaggctttgccggagacaccttaactgctactgcgcaggtacgtcatcagggcaagcaaaccggtgtttacgacatcgaaattgttaaccaacaacaaaaaacggttgcgctgtttcgcggtaaatctcaccgcatcggcggcaccattacaggagaagcctgatgcgtgaagcctttatctgtgacggaattcgtacgccgattggccgctatggtggggcattatcaggtgttcgggctgacgatctggctgctatccctttgcgggaactgctggtgcgaaacccgcgtctcgatgcggaatgtatcgatgatgtgatcctcggctgtgctaatcaggcgggagaagataaccgtaacgtagcccggatggcgactttactggcggggctgccgcagagtgtttccggcacaaccattaaccgcttgtgtggttccgggctggacgcactggggtttgccgcacgggcgattaaagcgggcgatggcgatttgctgatcgccggtggcgtggagtcaatgtcacgggcaccgtttgttatgggcaaggcagccagtgcattttctcgtcaggcagagatgttcgataccactattggctggcgatttgtgaacccgctcatggctcaacaatttggaactgacagcatgccggaaacggcagagaatgtagctgaactgttaaaaatatcgcgagaagatcaagatagttttgcgctacgcagtcagcaacgtacggcaaaagcgcaatcctcaggcattctggctgaggagattgttccggttgtgttgaaaaacaagaaaggcgttgtaacagaaatacaacatgatgagcatctgcgcccggaaacgacgctggaacagttacgtgggttaaaagcaccatttcgtgccaatggggtgattaccgcaggcaatgcctccggggtgaatgacggagccgctgcgttgattattgccagtgaacagatggcagcagcgcaaggactgacaccgcgggcgcgaatcgtagccatggcaaccgccggggtggaaccgcgcctgatggggcttggtccggtgcctgcaactcgccgggtgctggaacgcgcggggctgagtattcacgatatggacgtgattgaactgaacgaagcgttcgcggcccaggcgttgggtgtactacgcgaattggggctgcctgatgatgccccacatgttaaccccaacggaggcgctatcgccttaggccatccgttgggaatgagtggtgcccgcctggcactggctgccagccatgagctgcatcggcgtaacggtcgttacgcattgtgcaccatgtgcatcggtgtcggtcagggcatcgccatgattctggagcgtgtttgagcatatcaacctgcgagtaccctacaatgataaccaatacaaagcttgacccgattgaaaccgcgtctgttgatgagttacaggcgttgcaaacacaacgtctgaaatggacgctcaaacacgcgtatgaaaatgtcccgatgtatcggcgcaaatttgacgcagcaggcgtacatcctgatgatttcagggaactttcagacctgcgtaaatttccctgtaccaccaaacaggatctgcgcgacaactatccctttgacacctttgccgtgccgatggaacaagtggtgcgcattcatgcttcttcgggaaccacaggtaaaccgacagttgtcggttatacgcaaaacgatattgataactgggccaatattgtagcgcgttctttgcgtgcggcaggggctcgcccaaagacaaaattcatgttgcctatggttacggcctgtttactggtgggctgggcgcgcactatggtgccgaacgtctgggcgctacggtgatcccgatgtctggcgggcagacggaaaaacaagcgcaactgatccgcgattttcaaccagatatgatcatggttacgccatcttattgccttaacctgattgaagagctggagcggcagttgggcggtgatgccagcggttgctcgctgcgggttggcgtgtttggtgctgagccgtggacacaggccatgcgtaaagagattgaacggcgtctggggatcaccgcactggatatttatggcctgtcagaagtgatggggccgggggtggcgatggagtgtctggaaactaccgacggtccaactatttgggaagatcatttctatcctgaaattgttaatcctcatgacggcacaccgcttgccgatggtgaacatggcgaactgttattcaccacgctgaccaaagaagcattgccggtcattcgttaccgcacgcgtgatttaacccgactgttaccaggaacggcgcggactatgcgccgcatggatcgcatcagcggacgcagcgatgacatgttgatcattcgcggtgtaaatgtcttcccgtcacaactggaagaagagattgtcaaattcgaacatttatcgccccattaccaactggaggtgaaccgccgggggcatcttgattcactttctgtgaaagtggagttgaaagaaagcagcctgacattgacgcatgagcagcgttgccaggtgtgccaccagctgcgccatcggattaagtcgatggtggggatctctaccgatgtgatgatcgttaactgtggcagtatcccgcgttcagaaggcaaggcgtgtcgggtgtttgatctgcgcaatattgttggtgcctgacgtgtcgtctggccctggtgaggtaaagcgccagggccagaagtcgatacgacctgtgctatgattcataaatcacaacaataacaacagactgaatcgaatgagtaaacttgttacttttatccaacatgctgtaaacgctgttccggtcagtggcacatctttgatctcctctctgtatggtgattcgctttcccatcgtggtggtgaaatctggctgggtagtctggctgctttgctggaagggctgggatttggtgagcgtttcgtgcgcaccgctttgtttcgtcttaataaagaaggctggctggatgtttcccgcatcgggcgacgcagtttctatagcctcagtgataaaggcttgcgcctgacgcgacgggcagaaagtaaaatttatcgcgcagagcaacctgcatgggatggtaaatggctcctgttgctctcggaaggtttagataaatcaacgctggctgatgtcaaaaagcagttgatctggcaaggttttggcgcactggcacccagcctgatggcatcgccgtcgcaaaaactggccgatgtacagacacttttgcatgaagcgggtgtggcggataacgtgatttgttttgaagcgcaaataccactggcgctttctcgtgcagcactgcgtgccagagtagaagagtgctggcatttaactgaacaaaatgccatgtacgaaacctttattcagtcattccgcccgctggtgccgctgttaaaagaggcggcagacgagttaaccccggagcgggcatttcatattcagcttttactgatccatttttatcgccgtgtcgtccttaaagacccattgttgccggaggagttgcttccggcacactgggcagggcatacggcgcgtcagctgtgtatcaacatttatcagcgcgtagcgcctgctgctttagcgttcgttagtgaaaaaggtgaaacctcggtcggtgaactgcctgcgccgggaagcctgtattttcaacgttttggcggcttgaatattgaacaggaggcgttatgccaatttatcagatagacggtctgactccggttgtgccagaagagagttttgttcatccgacagcggtattgatcggcgatgttattctcggcaagggtgtttacgttgggccaaatgccagcctgcgtggcgattttggtcgtatcgtggtgaaagatggcgcgaacattcaggataattgcgttatgcacggttttcccgaacaggatactgtcgtggaagaagatgggcatattggtcatagcgctatccttcatggttgcattatccgccgcaatgcattagtgggaatgaacgcggtagtgatggacggcgcggtgattggcgagaacagcattgttggcgcatccgcatttgtgaaagccaaagcagaaatgccagctaattacctgattgtcggcagcccggcgaaagcgattcgtgaactcagtgagcaggagttggcatggaaaaagcagggtacgcatgagtaccaggtgctggtgacacgctgtaagcagacgttgcatcaagtcgaaccattgcgggaagttgaacctggcaggcagcgcctggtatttgatgagaatctgcgaccgaaacagtaacgtccagatactgaacattctaatttttagcatgtgatacctaaaccgcaacgctgatacaggttgcggttttttattgccggatgcggtacttgacgcgttttgttttgtgtttttcaggacaatagagcaactcatccagtaatcttgtttacgccctcgcattatttatctcttttcgtttctatactgatttttcttaatccgttttattacagggcagggtgcgatgagcagcaatacatttactctcggtacaaaatccgttaaccgtcttggttatggcgcgatgcaactggcaggtcctggggtttttggccccccaagagatcgccacgtcgctataaccgtgctgcgcgaggcgctggcattgggcgtcaatcacattgataccagcgacttttatggtccgcacgtcaccaatcagattatccgcgaagcgctttatccttactctgacgacctgacaattgtcactaaaattggtgcgcggcgtggagaggacgcttcctggttgcccgccttttctccggcagagttgcaaaaagcggtgcacgataatctacgtaatctcggcctggacgtactggatgtggttaacctgcgcgttatgatgggggatggtcatggcccagcggaaggatcgattgaggccagcctgaccgtgctggcagagatgcaacaacaaggcctggtaaaacatattggcctgagcaacgtcacaccgacgcaggttgcagaggcgcgcaagattgccgaaattgtctgtgtgcaaaacgaatacaacatcgcgcaccgtgctgatgatgcaatgattgatgctttggcccacgatggcattgcctacgtgccgttcttcccgctcgggggctttacaccgctgcaatcctctacgctgtcggatgttgctgcgagcctgggtgcaacacccatgcaggtggcgctggcgtggctgttacaacgttcaccgaatattttgctgatcccagggacgtcttctgttgcgcatttacgggagaatatggctgctgaaaaattgcatctttctgaggaagtgttgtctacgttggatggtatttcgcgagaataacgaatatacaaaagggaaagatgcatttcccttttgtttcttttttaatggcatggagtgcatatgtttaaggccaggatttgcggctggataggtttacttcccctgtttatgctgagtcttccagtacaggcggaacttcgatgtgttgcaaatacagttgatattgaaccatttttttctgcggctaccgctgaagataaacaacaagttgaacaagctatcaacagtagcgtgaatcttgtccccttcggtttatctgcatcggactggaaagtgcatcgtggcgatttagtggtagaaggtaatatagagagtaatcaaaaattgattgttcttggtaatttgacagtcaaaggtaatatttccactttctctctttctaatccatgggttattctcggtaacgtgacggcaacgaatatagttacggattcaccactgttaattaccggttcgataaatgcaagtggactggtatttatcgactcatattacgataatccgtctacgattaaggggagtattaatgcgcgtgggatatttatcaatgacataattgcacctattgttgcgtcttcgacaaatagtgaattcatggtccgtgcgagtgacaaaaatgacactgaaaatgtcaaaaaagcgctgatgataataaatcctgatgcatattattggggtctaataaatgatgaagatgctctgaaagaaatttttaagcgaagcaatattcgcatggcagggaatgtctgtaatcagatgaaaaaagaagcgctgtttcgccctaagccttctcctgagttagtgcaggaattgcaaatgctggatgaaggcaacgttgctgcatttgaaggacgagatattgcgacatttgatcttgccataatccgaactctcccaaggcttaaaggaatttcagctaacctacgcaaacaacttattaatagcaatgatgaacaaacgattgaaagtatggcgagatatatgcctgacaatgagattctggagttgaccgatcagcaattgggttaccagcctgttgttctggggttgctcgaccgtgaaccgctctctgtcgaaataatgacgcgaatgagtcgtctacctgatggtgtcggtccgttgaatcttgcgctacgtgaaaatctccctctggatatcgtaatgactctggcgaaaagagattgggatatgatcattcaggagctttataaagatgcgtggttattgcctgaatccattattgatggctatatccgcagtgatgattcctctattcgtcaggtcggtgctggaggacaactcacctacaatcaggcaatgcagttggcgaacgattcatcaaacaatgttgtcacaagcttagcgttcaagctggcagagatgaaacaccatggtcaattattgcggatgacgccacaagagagtgacaaagttgcagcctatttataccaaaaattcgagaatgacgatgatctaatacgtgtgttatttttagcattgccagataacttacagtttaattttgttaaaaggatggagaaaaaatcccctgcctacttttgctgtcgggatatgcaggtaattcactctgacgctgctctacaacggttattgacacgtttcaacgatcctgaggggtggagtaatctggcgaaaaatcagtatctgagcacgtcgatgaaacaaaaaatttggcaacgtgctttatcgcatcggaaaaataatccgaaagcagattcagctgcgtatgaaaccagcgctgatatgattttgtctgagcttatcagccacggtgaagttgatgatcagatgctattaaatgccacagccctgatacgtttggaagactgggactttttagagagtgcattagttagttgggataatttacccgctgttgtcctcaaggaattacagcaaaatacgccacgcaatgatatttgggcgaagttttttctgaggcaggaaaacagctcccgtgcgcaggttgatgaagcattacgcgtctattatgcactcgaccccgatgcgttagcacaactggatgtactggcaaaacaaccggatcgtatatggtggagtacactggcgaaaagcaatctcacatttttcaagttcggcgcacttaacaaccgccacacaccgcctgcagtactggcggcagaaattgatcccgagtggtggattgtggcgatgaataatccccgttttccagttgatgtattaaaggcgaggctgaaacgtgatcctttgctggcgttagagcttgttaaccctgaactggatttagtccgccagctggcgcttaacggtaagacgcgcgcaatacgggaacaagcgatgagaaaacttgatgagttgtattgatccacaacgtaatatttcttaaccctttgattaattggggataattattcctgacagtgagtccccaataccttgatatattctgaatttttaatgaagcggcgtgttgcgatatctccgtcaggggaattgatgcaccatagcgcaaaccgaattatcaaggattgataatgacgctctaccagataaaaccgctctttcagtcgctgttaaggccgacgatgttttggctttacaagcaccacgttacagcgaatcacatcactcttgctgcactggcgctttctcttcttaccggattgctgttggtgttggtggcacaacccatcctctttttgctattgcccatcgtgctttttatccgtatggcgctcaatgcgctggatggcatgttggcgcgtgagtgcaatcagcaaacacgtctgggggcgattttgaatgaaactggcgatgttatttccgatattgcgctctatttaccgtttttatttttaccggaaagtaacgcatcactcgtaatactcatgttattttgcaccatattgactgagttttgtggtttactcgcgcagacaattaacggtattcgcagttatgccggtccattcggcaaaagcgatcgtgcgttaatatttgggttgtgggggctggccgtttccatttatccacagtggatgcaatggaataatcttttatggagcattgcttcaattctgcttctctggactgcgattaatcgttgtcggagtgtgctttttatgagtgctgaaagataatgctggaaaaatctctggcaacacttttcgcgttgttaattttagcaacgctgataaaccgttttctgctatggcggttaccggagagaaaagggggtgaggttacattacgtattcgtacctggtggggcatcgtcatttgtttttcactggtgatttcaggtccacgctggatgacgttgacgttttttgcgctgataagttttctggcattgaaagaatattgtacgcttatatccatacattttccgcggtggttatattgggttattcctcttaactatttgcttatcggttttaattgctttgagctgtttctgttatttatacctttgtctgggtttctgatattagccacctggcgagtttttgtgggtgaaccctccggttttctgcataccgtgagcgctattttttggggctggataatgaccgttttcgccttgagtcatgccgcctggttattaatgtttccatccatgaatatccagggcggggcgttactggtgttatttcttttggcgttaaccgagtcaaacgatattgcacagtatttatgggggaaatcctgcggcagaagaaaagtggtccccaaagtcagcccgggaaaaacgctggaaggtctggtggggggcgtcatcaccaccatgattgcgtcactgattattggaccgttgctgacaccgctaaatacatcacaggcattattagcgggtttgttaattggtattagtggtttttgcggcgatgtagtgatgtcagccatcaaacgagatattggtgttaaagatagtggaaaactattaccaggacatggcggactccttgacaggattgactcattaattttcaccgctccggtatttttttattttatacgctactgctgttactgaaggaaaatagagaaaatggaaaattcacgcatctctggggaacatttttttaccaccagtgataatacagcgttgttttatcggcactggcccgctttacagcccggggcgaaaaaggtcatcgtcttatttcatcgtggccatgaacattctggtcgtctacaacatatcgttgatgaactggcgatgccagatactgctttttatgcctgggatgcccgagggcatggacaaacttcgggggcgcgtggttatagcccatctcttgcgcgttcagtgcaggatgtcgatgaatttgttcgttttgctgccagcaatagccaggtcggactggatgaggtggtagtgatcgcgcaaagcgtcggcgcagtgctggttgccacatgggttcatgattatgcgcctgcaattcgcgggctggtgctggcttctccggcctttaaggttaaattgtatgtgccgctggcacgtcctgcgctggcgttatggcatcgtctgcgtggtctgttttttattaattcctatgtgaaaggacgctatttgacccacgatcggcaacgggtggcgagtttcaataatgatccgctgatcacacgggcgattgccgtcaatatcttgctcgatctctataaaacgtctgaacgtattattagagatgcggcggcgattacgctccccacgcaacttctgatatcaggcgatgactatgtggtgcatcgccaaccgcagattgatttttatcagagattacgtagccctctgaaagagctgcatctgctgccaggcttttatcacgacacgttgggtgaagagaacagggcgcaggcatttgaaaaaatgcaaagctttattcgtcgtttatatgctaacaagtcacaaaaatttgattatcagcatgaagaccgcactggaccatcagcggatcgctggcggctcctttcaggtggacccgtgccattatcgccggttgatttggcgtatcgctttatgcgaaaggcgatgaaattgttcggggcgcactctgcgggcctgcatctcggaatgagcaccggctttgattcaggcagttccctggattatgtctatcaaaatcaaccgcaaggcagtaacgcattcgggcgcttaattgacaaaatctacctgaacagtattggctggcgcggtattcgccagcgtaaaacccatttacaaatactgattaaacaagccgttgccgatctccacgccaaaggtttagccgtccgcgtggttgacattgccgcagggcatgggcgctatgtactggatgcgctggcaaacgagcctgccgtaagcgatattttgttacgtgattacagtgagttaaatgttgcacaggggcaagcgatgattgcccaacggggaatgtctgggcgggtgcgttttgaacagggcgatgcgtttaacccggaggaactcagcgcgttaactccgcggcctacgctggcaattgtctctggactgtatgagctgtttcccgaaaatgagcaggtaaaaaactcactcgcaggtcttgccaatgccatcgaaccgggtggcattctcatctacactgggcagccgtggcacccacaactggagctgattgccggggtgttaaccagtcataaagatggtaaaccgtgggtgatgcgcgtgcgttcgcaaggggagatgaattcactcgtgcgtgatgccggatttgataaatgcacacaacggattgatgagtggggtatttttacggtttcgatggcggtgcgtcgtgataactgaacgtcggaacgtattgctacaaggcgctggctggttattgttgctggccccttttttcttcttcacctatggatctcttaatcagttcaccgcggttcaggaccttaacagccatgatatccccagtcaggtattcggttgggaaacggcgatcccttttcttccctggactattgttccttactggagtctggatcttttatatggattttcgctgttcgtttgtagcacgacattcgaacagcgccgacttgtccaccggcttattctggcaacggtaatggcctgctgcggttttttgctctatccgctgaagtttagttttatccgtcctgaagtgagtggggtgacgggatggctattttcgcaacttgaactgtttgatctgccttataaccagcctccttcgctgcatattattctctgctggctactttggcgtcactttcgtcagcatctggctgagaggtggcgtaaagtctgtggcggatggtttttactcatcgctatttctactctgacgacctggcagcatcattttattgatgtcatcacagggctggcggtaggtatgttgattgactggatggtgcccgtcgatcgtcgttggaattatcagaaacctgatcaacgtcgaatcaaaatagcactgccatatgtcgtaggcgcgggctcgtgcattgtgttgatggagctaatggtgatgattcagttatggtggtcagtctggttatgttggccagtattatcgctactcattattggccgtgggtacggtgggcttggcgcgataacaacagggaaagatagtcaggggaaactcccgcccgccgtttactggctgacattgccctggcgcatcgggatgtggctgtttatgcgttggttttgtcgtcgcctggagccggtgagcaaaatgactgctggtgtttatttaggggcgtttccacgacatattccggcacagaatgcggttctggacgtcacctttgaattccctcggggacgagcgacaaaagatcgactctatttctgtgtaccgatgctggatctggtggttccggaagagggggagctccgacaggccgtggcgatgctggaaacattacgcgaagagcaaggcagcgttctggtccattgcgcgttgggattatcgcgcagtgcgctggtagtggcggcatggttgttatgttacggacactgtaaaaccgttgatgaagcgattagttatattcgagccagacgttcgcatattgtgcttaaggaagatcacaaagcgatgctgaaattatgggaaaacaggtaagtggattgagatgtggactgaactacagtccacatcaagatcgtgtccggttatgcagcaacaatgctgtcgatggccgctttcgcgtcagactgcgctttcgctgccatttccggaccgtatgcgatcccttcggcgaagacaaatttcacatcggtaatgccgataaagccgaggaacgtggacagatacggcgtcaccaggtccgttggtccatctttgtggatcccaccgcggctggtaataacgatggcttttttacccgttaccagaccttccggaccgttctcggtatagcggaaagtaacgcctgcgcgtgcaaccaggtcaaaatagtttttcaactgagttgagatgttgaagttatacatcggtgccgcaataacgataacgtcgtgggctttcagctcggcaatcagctcatcggaaagcgccagagcttcctgctgacgcggagtcagcggcgcatcgctcggacgcagtgcaccaaccagttcgccatccagtaccggaatcggatttgcagccaggtcgcgaacggtgatttcatcagcggagtgcttttcgcgccattgttcaacaaaataatcggacaactgattagactgagagtaccctgccaggatgctggatttaagaactaataccttgctcatggtgtttccttatagatgtttgaatgggcgatgccccgttgcttgctgacactttattcacaatcctgccacagagatagcgcaataaatcgaagcctatgttcgaatttattgaacaacgcatagaaagccgcgatgtggtactctatatctatcatttaaaagaaaattaatcaggcagactactgcccactaacgttatgacagaacaacaaaaattgacctttacggccttgcagcagcggctggattcgctgatgctgcgcgacagactgcgtttttctcggcgtctgcacggtgttaagaaggttaaaaatcctgatgcacaacaggccattttccaggagatggcgaaagagattgaccaggcggcagggaaagtcctgctgcgtgaagcggcacgaccggaaattacttatcctgacaatttaccggttagtcagaaaaaacaggacattctcgaagcgattcgtgatcaccaggtggtgatcgtcgccggggaaacgggttctggtaaaacgactcagttaccgaaaatctgtatggagctggggcgcgggattaaagggctgatcggccatacccagccgcgtcgcctggcggcaagaacggtggcgaaccgtattgcggaagagctgaaaacggagccgggcggttgcatcggttacaaagtgcgtttcagcgatcacgttagtgataacacgatggtcaagctgatgaccgacggtatcctgctggcggagatccagcaagaccgcctgctgatgcagtacgacaccatcattattgacgaagcacacgaacgcagcctgaatatcgattttctgctcggctatttgaaagagttgctgccgcggcgtcctgacctaaaaatcattatcacttccgcgactatcgacccggaacgcttttcgcgccactttaataatgcgccgattatcgaagtctccggtcggacctatccggtggaagtgcgctatcgaccgattgttgaagaagccgacgacaccgagcgcgatcagttgcaggcgatttttgacgccgtagacgaactgagtcaggaaagccctggcgacattctgatctttatgagtggtgagcgggaaattcgcgataccgccgatgcgctgaacaagctaaatctgcgtcataccgaaatcttgccgctttatgcgcggctttcgaacagcgaacagaaccgcgtgttccagtcgcacagcggacggcgcattgtgctggcgaccaacgtcgcggaaacctcgctgaccgtaccggggattaaatacgttatcgaccccggtacagcacgtatcagccgctacagctatcgcaccaaagtgcagcgtttgccgattgaacccatttcgcaggcgtctgccaatcagcgtaaaggccgctgtgggcgtgtgtccgaagggatctgtattcgtctctattccgaagacgatttcctttcgcgcccggagtttaccgatccggagattctgcgtaccaacctggcctcggttattttgcagatgaccgcgctggggctgggcgatatcgctgcgttcccgtttgtcgaagcaccggataaacgcaatatccaggatggcgtgcgtctgctcgaagaactgggcgcgatcaccacggatgaacaggccagcgcctataaactgacgccgctcggtcgccagctctcgcagttgcctgtcgatccacgtctggcgcgtatggtgctggaagcgcaaaaacatggctgcgtgcgtgaggcgatgattatcacgtccgcgctttccattcaggatccgcgcgagcgtccgatggataaacagcaggcatcggacgaaaaacatcgtcgcttccacgacaaagagtctgacttcctcgcgtttgtgaatctgtggaattatcttggcgagcagcaaaaggcgctttcttccaacgccttccgtcgcctgtgtcgtaccgattatctcaactatctgcgcgtgcgcgaatggcaggatatctacacccagttgcgccaggtggtgaaagaacttggcattccggttaacagcgaaccggcggagtatcgcgaaattcacattgcgttgctgacgggtttactttcccatatcggcatgaaagatgccgataaacaagaatataccggcgcacgtaacgcgcgtttctccatcttccccggttctggtttattcaaaaaaccgccgaaatgggtaatggtggcggaactggtagaaaccagccgcctgtgggggcgcattgctgcgcgtatcgacccggaatgggtggagcctgtcgctcagcatttgattaaacgtacctacagcgaaccgcactgggaacgggcgcagggcgcggtgatggcaacggaaaaagtcactgtttatggtttgccgatagttgccgcgcgcaaggtcaactacagccagatcgatccggcgttatgtcgtgaactctttattcgccatgcgctggtggaaggtgactggcagacgcgtcacgcattcttccgtgaaaacctgaaactgcgggccgaagtggaagagctggaacacaaatcacgtcgccgcgatattctggttgatgacgaaacgttgtttgagttctacgaccagcgcatcagccacgatgtaatctccgctcgtcacttcgacagctggtggaaaaaagtcagccgcgaaacccctgatttgctcaactttgaaaaaagcatgttgatcaaagagggcgcagaaaaaatcagcaagctggattacccgaacttctggcatcagggcaatctcaagctgcgtttgagctatcagtttgagcccggcgcggatgctgacggtgtgaccgtacatattccgctgccgttacttaaccaggttgaggagagcgggtttgaatggcagatccccggtctgcgccgcgaactggtgattgctctgattaaatcgttgccgaaaccggtacgccgtaattttgtacccgcgccaaactatgccgaagcgtttttaggccgcgtcaaaccgctggagttaccgttgctcgacagccttgagcgcgagttacggcggatgaccggcgttaccgttgaccgcgaagactggcactgggatcaggtgcctgatcacctgaaaattaccttccgcgtggtggatgacaaaaacaagaagctaaaagaagggcgctcgctacaagatctgaaagatgcgctgaaaggcaaagtgcaggaaacgctatctgcggtggcggatgacggtatcgagcagagcggcttacatatctggagttttggtcagctgccggaaagctacgaacagaagcgtggcaactacaaagtgaaggcgtggccggcgctggtggatgagcgcgacagtgtggcgatcaaactgtttgataacccgctggagcaaaagcaggcaatgtggaacggtcttcgccgtctactgctgctgaatattccatcgccaatcaaatatttacatgaaaagttaccgaacaaagccaagctgggactgtactttaacccgtatggcaaagtgctggagctgatcgacgactgtatctcctgcggtgtggatcaattgatcgacgccaatggtggcccggtctggacggaagaaggctttgctgcgctgcatgaaaaagtgcgcgccgaactgaatgacacggtggtggatattgcgaagcaggtcgagcaaatcctcactgcggtgttcaatatcaacaaacgtctgaaagggcgggtggatatgaccatggcactggggctttctgacattaaagcgcagatgggcgggttggtatatcgcggttttgtcactggtaacggcttcaaacggctgggcgacacgctgcgatatttgcaggcgattgaaaaacggctggaaaaactggcggttgatccacatcgcgaccgtgctcagatgctgaaagtcgaaaacgtccagcaggcgtggcagcaatggatcaacaaactgccgcctgcacgtcgtgaggatgaagacgtgaaagagatccgttggatgatagaagagttgcgcgttagttacttcgctcaacaacttggtacgccttatccgatttcagataagcgtattttgcaggcgatggagcagattagcggttaaccctgctatttgcctgataaagaaaaaacccggtaagcatttagcgccgggttttttattaattctaaaacggtaagggtaaaaattcaggaattcagaaaaatacaattctctgctgcaagatgaataatgtttatctacagcatttccttaaaagatatgtcaggcttgcggagtggcggttaaggacatacgacttcctcctttcagagtgctccgcttctcactattatctcacgcagtattcttaagggaacgataaggaggaaccatgaacattaccccgtttccgacgctttcgccggcaactatagatgccataaatgttatcggacagtggctggcgcaggatgatttctccggtgaggtgccgtatcaggccgattgcgtgatccttgcaggcaatgcggttatgccgactatcgacgcggcatgtaagattgctcgcgatcagcaaattcctttactgattagtggtggtatcggtcactcgacaacttttttgtatagcgccatcgcacagcatccgcactacaacactatccgcaccactggcagagcagaagcgaccatcctggcggatatcgctcatcagttctggcacattccgcatgaaaaaatctggattgaagaccagtcaacaaactgcggtgaaaacgcacgctttagcatcgcgctattgaaacaggccgtagaacgagttcatacggctatcgttgttcaggaccccaccatgcagcggcgcacgatggcgacgttccgccgtatgactggggacaatcccgatgcaccacgctggttaagttatcccggattcgttcctcagttaggaaataacgcagacagtgtaatctttattaatcagttacaaggattatggccggttgagcgttatctctcactactcactggcgagctgccgcgtttacgcgatgatagcgatggctacggtccccgcgggcgagattttatcgttcacgttgattttccggcagaagtcatccatgcatggcaaatgctgaaacatgatgcggtgctcatcgaggcgatggaaagtcgctcgttacgttaaaaattgcccgtttgtgaaccacttgtttgcaaacgggcatgactcctgacttttatttctgccttttattccttttacacttgtttttatgaagcccttcacagaattgtcctttcacgatgccgtctctctgatgattgatgttaattaacaatgcattcaccgaaaataaacatataaatcacaggagtcgcccatgtcagtacccgttcaacatcctatgtatatcgatggacagtttgttacctggcgtggagacgcatggattgatgtggtaaaccctgctacagaggctgtcatttcccgcatacccgatggtcaggccgaggatgcccgtaaggcaatcgatgcagcagaacgtgcacaaccagaatgggaagcgttgcctgctattgaacgcgccagttggttgcgcaaaatctccgccgggatccgcgaacgcgccagtgaaatcagtgcgctgattgttgaagaagggggcaagatccagcagctggctgaagtcgaagtggcttttactgccgactatatcgattacatggcggagtgggcacggcgttacgagggcgagattattcaaagcgatcgtccaggagaaaatattcttttgtttaaacgtgcgcttggtgtgactaccggcattctgccgtggaacttcccgttcttcctcattgcccgcaaaatggctcccgctcttttgaccggtaataccatcgtcattaaacctagtgaatttacgccaaacaatgcgattgcattcgccaaaatcgtcgatgaaataggccttccgcgcggcgtgtttaaccttgtactggggcgtggtgaaaccgttgggcaagaactggcgggtaacccaaaggtcgcaatggtcagtatgacaggcagcgtctctgcaggtgagaagatcatggcgactgcggcgaaaaacatcaccaaagtgtgtctggaattggggggtaaagcaccagctatcgtaatggacgatgccgatcttgaactggcagtcaaagccatcgttgattcacgcgtcattaatagtgggcaagtgtgtaactgtgcagaacgtgtttatgtacagaaaggcatttatgatcagttcgtcaatcggctgggtgaagcgatgcaggcggttcaatttggtaaccccgctgaacgcaacgacattgcgatggggccgttgattaacgccgcggcgctggaaagggtcgagcaaaaagtggcgcgcgcagtagaagaaggggcgagagtggcgttgggtggcaaagcagtagacgggaaaggatattattatccgccgacattgctgctggatgttcgccaggaaatgtcgattatgcatgaggaaacctttggcccggttctgccggtggtcgcatttgacacgctggaagatgctatctcaatggctaatgacagtgattacggcctgacctcatcaatctatacccaaaatctgaacgtcgcgatgaaagccattaaagggctgaagtttggtgaaacttacatcaaccgtgaaaacttcgaagctatgcaaggcttccacgccggatggcgtaaatccggtattggcggcgcagatggtaaacatggcctgcatgaatatctgcagacccaggtggtttatttacagtcgtaatgagtaaaagaggcggaggttttttcctccgcctgtgcgcgtcagagtttagcgaatttttcgagggtgcgaataagctgcgtgacgaagccatattcgttatcgtaccaggcgaccgttttcaccagttgtaaatcgcccacggcggtaatttccgtttgcgtggcatcaaacaccgaaccgaaatggctgccaatgatatcggaagagactatttcttcatcggtataaccaaatgactcgttattggtggttgcttgtttaagtgcgttattcacctcttcggcagtcactttttttccgagaatggacaccagctcagtgaccgaacctgttttcaccggcacgcgttgcgcatgacctttcagtttgccgctcagttccgggatcaccagaccaatggcttttgccgcccccgtagtgtggggaatgatattttctgccgctgcgcgtgaagcacgtaaatctttaccacgtgggccatccaccagtgactgggtgccagtataggcatgaatggtcgtcatcgtgccgacttctatcccgaaactgtcatgcaaggctttggccatcggcgcaagacagttagtggtgcatgacgccacggaaacaatggtgtcgttgccatccagagtgtcgtcattgacgttataaacgatagttttcatttcaccggcaggggcggaaatcaacaccttcttcgcaccagcatcaagatgcgcctgcgatttctcggcggaggtataaaagccagtacattcgacaatgatttctgcacctttcgctttccacggaatatttttagcctctttttcggcgtaaaccgcgatacttttcccatcaacgataagtgaatcttccgtaaaatcaacgctccaggggaatggtccgtagtttgaatcatgtttcagcaggtaggcgagaatttttggggaagtgagatcattaatagcgacaacgtctatgttgcttttgacttcaagtaatcgacgcaacaccagtcgaccgatacgaccaaaaccgttaataccaactttactcatggttttctcctgtcaggaacattcggatgaaaattgatcctttccaggcttagcccaggattgtgggatgggcaatctccattcttacagtgaaacgtaacgtactgaaaacgggtgaacaatatttaatgaaattttgagaaaagcccgttatgttaacggaaaattatgttaaagcaggaaatgttatggaaaataaatactcaaggttacaaatcagcattcactggctggtctttttgctggttatcgcagcgtattgcgcaatggagtttcgtggtttcttcccacgtagcgatcggccactcatcaacatggttcatgtttcctgtggtatctcaattctcgtgctgatggtggttcgtcttttgttaagactgaaatacccaaccccgccgattatacctaagccaaaaccgatgatgacgggactggcgcatttgggacatttggtgatttatctcctgtttattgcgctgccagtgattggtttggtgatgatgtataaccggggcaacccgtggtttgcgtttggtttgacgatgccttacgcttcagaggccaatttcgaacgggttgatagcttaaagtcgtggcatgagacgctggcgaatctgggatattttgtcatcgggttgcacgctgcggctgcactggcacaccactatttctggaaggacaacacacttctacgcatgatgccgcgtaaacgttcctgaaggatatttaaagaaaacgcctgtactaaaaccgacccgtggtacaggcgaagaatacgggtctacatcggaagcgcctattatatttatttgtatgacaaataaaaccataatccttgcccatacgtccatctggcttatttttaatcaattcacccgatctttgatctcatcaacggtatcaaaataaaccagcgtataacgttcaaatcgaacataagattcgataaaccatggaggttatatgaaaaaactggcacttattttgtttatgggaacgcttgtttccttttatgccgatgccgggcgcaaaccctgttctggttcgaaaggggggatctcacactgtacggcaggcggcaaatttgtctgtaatgatggttctattagtgcctcgaaaaaaacatgcactaactgaagtgtaaaaggggtgccatgagaaaatgaatctgctagtcagatgcgcggggaaaatccccgcgcttgcccttacctggacgtgcaggccatgagcgcagcaacctccttatcaccgtcccggaaccgcagttcgtagagcgtttgtcgggtcaggagtgtgaatgtcagaatcgtaatgcagataatgagcagacacaccaccagagggttgtgcttcatagcctttctccttgccggatggcgggtaagaggctaagatctgaattgctaggttcattcgttggcctcggttgatagaaatatcggtcggggccttcgtctttctgattcccggttagcctgaaaacagaaagtctcaggcacccgcaggcatcctatgaggtttccttagggacgaaaataatcacttcacgaaattgcgtgctgttttccagaatttttcgtcattcgggttagccagtttagccattcgttactctcttcattccaatagcattaattttctctgcaataattgttgtaaaaatgtgacgcaaagaggtttttggtcataagtaattaccgtcaagtgccgatgactttctatcaggagtaaacctggacgagagacaacggtaatgaatacaactccctcacatcgattaggttttttgcatcacatcaggctggttccgttatttgcctgcattcttggcggtatcttagttctattcgcattaagttctgctctggctggctatttcctctggcaggccgatcgcgatcagcgtgatgttactgcggagattgagattcggaccgggttagcgaacagttcagattttttgcgttcagcccggatcaatatgattcaggccggggctgcgagtcgtattgcggaaatggaagcaatgaagcgcaatattgcgcaagccgaatcggagattaaacagtcgcagcaaggttatcgtgcttatcagaatcggccggtgaaaacacctgctgatgaagccctcgacactgaattaaatcaacgctttcaggcttatatcacgggtatgcaacctatgttgaaatatgccaaaaatggcatgtttgaagcgattatcaatcatgaaagtgagcagatccgaccgctggataatgcttataccgatattttgaacaaagccgttaagatacgtagcaccagagccaaccaactggcggaactggcccatcagcgcacccgcctgggtgggatgttcatgattggcgcgtttgtgcttgccctggtcatgacgctgataacatttatggtgctacgtcggatcgtcattcgtccactgcaacatgccgcacaacggattgaaaaaatcgccagtggcgatctgacgatgaatgatgaacctgcgggtcgtaatgaaatcggtcgcttaagtcgtcatttacagcaaatgcagcattcactggggatgacagtagggactgttcgacagggcgcggaagagatttatcgtggcaccagcgaaatttcagctggcaatgcggacctgtcatctcgcaccgaagaacaagcggcggctatcgaacaaactgccgccagcatggagcaactcactgcgacggtgaaacagaatgcggataacgcgcatcatgccagcaaactggcgcaagaggcttctattaaagccagcgatggcgggcagacggtttccggtgtagtaaaaacgatgggcgctatctccacgagttcgaagaaaatttctgagatcaccgccgtcatcaacagtattgctttccagacgaatattctggcactgaatgctgccgttgaagccgcgcgagcgggtgagcaagggcgtggatttgccgttgtcgccagcgaagtacggacactcgcaagtcgcagcgctcaggcggcgaaagagattgaaggcttgatcagtgaatcagtcaggttaattgacctggggtcggatgaggtggcaacggcagggaaaaccatgagcactattgttgatgccgtcgcgagtgtcacacatatcatgcaggaaatcgccgccgcctcggatgaacaaagtagaggcataactcaggttagccaggcgatttctgaaatggataaggtgacgcaacagaatgcttctctggtagaagaggcctcagcagcggcggtgtcccttgaagaacaggcggcacgattaactgaggcggtggacgtattccgtctgaacaaacattctgtgtcggcagaacctcgcggagcgggtgaaccagttagtttcgctacggtgtgaaaatgttcaaggagggatcgacagatcccttcacctttcagaacggcattgattttcgaatagcgttaatcatcaactggcaaccagaagagaacgtcgcatctacgcgggtcagtattccaatcggttcgcctgcaccatgtcccggaacaggcagggccaccagcgtggcatgacgcaggtcgtcttttaccgcgccagaagggacaaaccacacgtagtcgtattcaaccgtaagttgacgagatagcgaagcagacagcgtttcgatacaacccgaaggaattttacagccctggctctgcactaatgcatctgaatgctggcgtggcgcagtgccttctggtgatacaacgaccggccattccagcacccggcttagcgttacgttctcctgaagtagcgggtgattagggcggacaaccagcttcagcgattcaagaaacagcagttcgtaattaagcccggtcatcagttcaggatctgacatccgaccaatgccgatatcgatttccccggtttttaaacccgccagaatcatagggttactcattgtcgcaacttgcaaggtcgtctctttttgttgctgatgaaactgacctataaccgaaggtaatatccccagtgccgcagtaggtagtgcaccaaccctgacgacatcattattaagatcttctttacgatgaagcgactgtccggcagtgttgatggcgtcaagaactctgactgcatgcgttaaaaattgttcgccgggtaaggtaagttgcgccccctgacgaccacgctcaaacaagcgagcgccagtcagctgctccagttcattcaatgtcttagagagcgcaggttgactcaaattaagggtttcagccgcgcgccccaaagttccttgttgtgcgacagctacgaatgtatgaaggtggcgcaaacggatgcgctgactaaacagactatttttttccataagcgatgttaaaaacgaagcggtgtcgctgacaagtgaagttgtttgattatgataacttgattgcaaaatattattaacaattaaagcaattatgttacagcaaaatggataatattgatgttttcgcggcgagatcacagtttgtaaattcttcccgccagagtgaatgcggttacctacactccagattactgaccactggaggcagacactatggcgaacagcatcacggcggatgagattcgggaacagttttcgcaggcaatgtcagccatgtaccagcaagaagttccgcaatatggcacgctgctggaactggtagctgatgtgaatctggctgtgctggaaaacaatcctcaactgcacgaaaaaatggtaaatgcagacgagctggcgcgactgaatgttgaacgtcatggggcgattcgcgttgggactgcacaagagcttgctactcttcggcggatgtttgccattatggggatgtacccggtgagctattacgatctctcgcaggcaggggtgccggtacattcgacagcatttcggcccattgatgatgcttctctggcgcgtaatcccttccgcgtttttacctccttactccgccttgagcttatcgagaacgaaattttgcgccagaaagcggcggagattctgcgtcagcgcgatatcttcaccccacgttgtcgacaactgttagaggaatatgagcagcagggcggttttaacgaaacacaggcacaggagtttgtgcaggaagccctggaaacgtttcgctggcaccagtcagcaacggtagatgaagaaacctatcgcgccttgcacaacgaacatcggttgattgctgatgtggtctgttttcctggatgccatatcaaccacctgacgccacgtacgctggatattgaccgggtgcagtcgatgatgcctgaatgcggaattgaacccaaaattctcatcgaggggccgccgcgccgcgaggtaccgattttactacgccagaccagctttaaagcactggaagagacggtgttgtttgcggggcagaaacagggcacgcataccgcgcgctttggtgaaattgagcagcgtggcgtggcattaacgccgaaagggcgacaactgtatgatgatcttctgcgtaacgctggaaccgggcaggataatctcactcaccaaatgcatttacaggaaaccttccgcacttttcctgacagtgagtttttaatgcgtcagcaagggctggcatggttccggtaccgtctgacgccttcaggtgaggcgcatcgtcaggcgattcatcccggagacgatccacagcccttaattgaacgtggttgggtcgcggcgcaacccattacctatgaagatttcttgcccgttagcgcggcggggatcttccagtcaaatctgggtaatgaaacgcagacacgcagtcacggtaatgccagtcgcgaagcatttgagcaggcgttgggttgtccggttttggatgagttccagctttaccaggaagcggaagaacgcagtaaacgtcgctgtggtttgctttaaattctgaccatccgcctttgcaaaaatttgcctgattttacaaacgaatcaggctcatcccatcgacataaaaaaatgccgatttatgcatattctctcagttcaacaattggattattaataaatattgtctagagtgagcggtcataaataagcactttcttgccgctgaaaacgaccagcgcgggaccattcacaacaccagaaggactcactttcaggtatggatcgtagacgatttattaaaggttcaatggctatggccgccgtgtgcggtaccagcggcattgcttctcttttttctcaggcggcattcgcggcagattctgatattgccgacgggcaaacccagcgttttgacttctccattctacagtcaatggcgcacgacttagcgcaaacagcgtggcgtggtgcgcctcgtccgttacctgacacgctggcgacaatgacgccgcaggcttataacagtattcaatacgacgccgaaaaatcgctctggcataacgttgagaaccgtcaactggacgctcagttcttccatatgggaatgggattccgtcgccgcgttcgtatgttttctgtagatccagcaacacatctggcgcgtgaaattcactttcgcccggagttgttcaaatacaacgatgcgggtgttgatacaaaacaattagaagggcaaagcgatctcgctttgccggttttcgcgtgtttaaagcccccgaactggcgcgccgtgatgtagtatcatttctcggcgcgagttatttccgcgccgttgatgatacatatcaatacggtttgtcggcccgcggcctggcgatcgacacttacactgacagtaaagaagagttccccgactttaccgccttctggtttgatacggtaaaaccgggggcaactacctttaccgtttatgcgttgctcgatagcgccagcattactggtgcctataagttcactatccattgtgagaaaagtcaggtgattatggatgtggaaaatcacctgtatgcgcgcaaagacattaaacagctgggcattgcgccgatgaccagtatgttcagctgcggtactaatgaacgtcggatgtgcgatacaattcatccgcaaattcatgactctgatcgtctgtccatgtggcggggcaacggcgagtggatttgccgtccgctgaataatccgcaaaaattgcagttcaatgcttacaccgacaacaacccgaaagggtttggtttattgcaactggatcgtgacttctcccattatcaggacattatgggctggtataacaaacgcccaagtctgtgggtggagccgcgtaacaagtggggtaagggcaccatcggcctgatggaaatcccaacaacgggcgaaacgctggataacattgtctgcttctggcagccagaaaaagctgtaaaagcaggtgatgagtttgcattccagtatcgtctgtactggagtgcgcaaccgcctgttcattgcccattagcgcgcgttatggcgacgcgtaccggcatgggcggtttcccggaaggttgggcaccaggtgaacactatcccgaaaaatgggcgcgtcgttttgccgtcgatttcgttggtggtgatctgaaagctgccgcaccaaaaggcattgagccggtgattacgctttccagtggggaagcgaagcaaatcgaaattctctatattgaacccattgatggttatcgtattcagtttgactggtatccgacttcggactccactgatccggtcgatatgcggatgtatctgcgttgtcagggcgacgctatcagtgaaacatggctgtatcagtatttcccgccagcgccggataaacgtcagtatgttgacgaccgcgtgatgagttaatcgttttttcttcggcaccttcttcgggaggtgccgtctggttaaacacgatcccgctcgcatttttccctaagttaaatgagtaatctgatggtgtgtatttcagatacaccttgtcagccactaacagggagtgcgtatgtttccagaataccgagatttaatatcccgtctgaaaaacgaaaatcctcgctttatgtccttgttcgataaacacaataaacttgatcatgaaattgccagaaaggaaggttccgacggtcgagggtacaatgcggaagtggtccgcatgaaaaaacaaaagctacagttaaaagatgagatgctcaaaatcctgcagcaggagagcgtcaaagaggtgtaaactttcctaagccgccagccaggcggcttttttaacaacagcatggattgactggagataagatgactgaaacgataaaagtaagcgaatcacttgaattacatgctgttgcggaaagtcacgtcacacctctttatcagttaatctgtaaaaataaaacctggttacagcagtcgctaaactggccgcagttcgttcagagtgaagaggacacgcgaaaaacggtgcagggtaatgtgatgttgcatcaacgcggctatgccaaaatgttcatgattttcaaagaagatgaacttatcggcgttatctcgtttaatcgtattgaaccactgaataaaactgctgaaatcggctactggctggacgaatctcatcaggggcaggggatcatttctcaggcgctgcaggcattgattcatcattacgctcagtctggtgaacttagacgcttcgtgatcaaatgtcgggtggacaatccgcaaagcaaccaggtcgctttgcgcaatggttttatccttgaaggttgcctgaaacaggctgagttcctgaatgatgcctatgatgatgtgaacttatacgcgcgtattatcgattcataataaccctgccagcggcgttcgcgtaatgcgctcctcgccgttaatgacttttggaccacggacatgaaccgtgtcgccatcaaaggcttcaacgacggcgtggtcggttaactccacatggttttcaattatcaccgcacctgaaatacggctctcaccttgtattacaacgtgctcgtcgagcagaatcggtccaccacgtaccacggcatttccgccaatcaagacatgatgttttaacacacaattaccttccacaatggcatattccgccacctgcgaactgtaatgaatcgtcggaatggcatcttcttctatgccagctttcacctgcgcgtgaccgtagactttagcgcaatcgcatagccagacgttgttctcttcattaccttcaacactggcaaaatcaaaaatttcggcgcgatgttcaataaaagcataccggacgacggcatcgccataaatttgtgcctggtggacaatacgcgaggcgctaacccttgcgcgatcataaatttggagcaggagttgatggtcgggcgttaagccttgtgcggcgacgatcatagaatgttgatcaattaaggcgtgaccaaatattctacattgcccgtaaactaatgagtcatgaatggtgacactgtcacttatatatgcaccctggctgatttcactattatcgatccagacgttatccgttgcgtaaacctctccccacagcacgctggtgccggtgatgcgcgtattaccggaaatcaccgctccgccgaacgcaatagcattctggtcgtaaatccagcaatttccttcttgtgctaacaccgtttcgcgatcgatccagccgccagcggttcctgctatcacatcgttaaaatcgctaatggcgataatctgccgtaataacacattttttttagtgccatcttcctgataactaaaggctcgctgttcttcacttagacgatatttgcgcatagcgttttcccacaggtgacttactataaccgtagcaaattctgcggctctggctatgctcgagaaaattccataaaatgcatttcaaatatactttataaattaaacaaaatgagtaagaagatgcagagcgataaagtgctcaatttgccggcaggctactttggtattgtgttggggacgatagggatgggatttgcctggcgctatgccagccaggtttggcaggtcagccactggttaggggatgggctggtgattctggcgatgatcatctggggattgttaactagcgcatttattacccgacttatacgctttccgcatagcgtgctggcagaagtgcgccatccagtgctgagcagttttgtgagtttgtttccggcaacgacgatgctggtggcgattggttttgttccgtggtttcgcccactggcggtgtgcctgttcagttttggtgtcgtggttcagttggcttatgccgcctggcaaactgcgggattatggcgcggatctcaccctgaagaagctaccacgcctggactgtatctgccgacagttgccaacaactttatcagcgcaatggcctgtggtgcgttgggctacaccgacgccggtctggtgtttttaggcgcaggcgttttctcatggctaagccttgaacctgtgatcttgcagcgtctgcgcagttcgggagaattacccacggcactgcggacatcactcggcattcagctcgctcctgcgctggtggcctgtagtgcctggttgagcgtcaacggcggcgagggtgatacgctggcgaaaatgctttttggttatggactgctgcaactgctgtttatgctacgtctgatgccatggtatctctcccagccatttaatgcttcattctggagtttctcgttcggcgtatctgcactggcaaccaccggtttgcatctggggagtggcagcgaaaatggatttttccatacgctggcggtaccgctgtttatctttaccaattttattattgcaatactgctcatccgtacttttgcgcttctgatgcagggaaaattgttagtcagaaccgagcgcgccgttttaatgaaagcagaggacaaagaatgatcattcgtgacgaaaactattttactgataaatatgaattaacccgcacacactctgaagtactggaagcggtgaaagtggttaaaccgggtaaaacgctggatctgggctgtggcaatggtcgtaacagtctttacctggcagccaatggttatgatgttgacgcatgggataaaaatgccatgagtatcgccaatgtagagcgcattaaatccattgaaaatctggataatttacacacccgagtcgttgatctgaataacctcacatttgatagacagtacgattttattctttcgactgtggtactgatgttccttgaggctaaaaccatccccgggttgattgccaatatgcaacgttgcactaaacctggtggttacaacctgattgtggcggcgatggataccgctgattatccatgtaccgtcggcttcccgtttgccttcaaagagggagaattacgtcgatattacgaaggctgggagagggtgaaatacaatgaagacgtcggcgagctgcaccgcaccgacgccaacggtaatcgtattaaactgcgtttcgccacgatgctggcacgtaaaaaatgacccgctaagaataaggcgcgtgaaaattccccacgctgagatgatttactgttcttcttttcggtaagcatattttttatcgaagggatgtgaaattaatcacagtagtcgaagttttttagcagcttaacttactgaaatttaactactgatgattgacttagcccctttttcggcattgactatgtcgtctgaaaaggggctgaaaaatttattttcaccaacactttttttgccacaacacgaagcggcgctttttgctataacttaaaaagtaatataatcatctcaggaaactattcatgcgtaccacatcatttgcgaaagttgcagctttatgcggcttgttggctctgtctggttgtgcctctaaaatcacccagccagataaatattctggttttttaaacaattactctgatttaaaagaaacaacctcagcaacaggtaaacctgttttacgttgggtagacccgagttttgatcaaagcaaatatgacagcatcgtctggaacccaatcacttattatccggtgccaaaaccttctacccaggtagggcagaaagttctggataaaattttgaactataccaacaccgaaatgaaagaagcgatagcgcagcgtaaaccactggttaccaccgctgggccgcgtagtctgattttccgtggggccattaccggtgtagataccagcaaagaagggctgcaattctatgaagtggttcctgttgcattagtggttgcggggacgcaaatggctacaggccaccgtaccatggatactcgcctctattttgaaggtgagctgattgatgcagcgactaataaaccggttatcaaagtcgttcgtcagggcgaaggtaaagacctgaataacgaaagtacgccaatggctttcgaaaatattaaacaagttattgatgacatggcgaccgatgccaccatgtttgacgttaacaaaaagtagttccagacgcgccatcgttagatggcgctttttatccggtgtgccgtaaaaccccatccttcagggcggggatataaggcgcggttttccacctgaccaggtgtttgctgttgttcaatgtattggcggatgacggatattggcgcacctccgcagctactggcaaaatagccaggactccacaaaacgcctttgtagtaatacctgactgcaatatctggtcgatctcgtcgcagtaacctacccgatacgcctttgaggctgtttaccagactggatatcgccagtttgggaggttagttaattaacaaatggacgtgatctggttcgccatccatttcaaccagttcagcttcaaaataagcacatacatttgaaaagtaagtgcgtagtttttctgtcgcgtcaaaaaatctggcgtcggtatctggtgacaaagaccaggtgaacatgcatcaggaaaacacaatgccttccacgccggatatcggtttctttattcacagaccaaagtatcatttgacctgtgaaacgattacaggcatttaaattccagttaagaccaggtggtcaacaggagtgtgaaatgaggcgcttcgcaggcgcatgtcgtttcgttttcaatcgtgctctggcacgtcagaatgagaatcatgaggccggtaataaatacatcccttacgggaaaatggcttcctggctggttgagtggaaaaatgccactgaaacgcaatggcttaaagattctccctcacagccattgcaacagtcactgaaagaccttgagcgggcttacaaaaacttcttccggaagcgggctgcttttccccgattcaaaaagcggggacagaatgatgcattccgctacccgcagggcgttaagctcgatcaggaaaacagccgtatttttctgccgaaactgggctggatgcgctaccggaatagccgtcaggtcacgggtgttgtgaaaaatgtcactgtcagccagtcctgcggtaagtggtacatcagtattcagacagaaagtgaagtatccactccggctcacccttcagcatcaatggtcgggctggatgctggcgtggctaaactcgccacgctgtcagatggcacagtctttgagcctgtaaacagttttcagaaaaaccagaagacgctggcgagacttcagcgacagttaagccgcaaggtcaaattcagcaacaactggcagaagcagaaacgcaaaatacagcgactgcattcctgtatcgcaaatatccgcagggactaccttcacaaagtcacaacggccgtcagcaaaaaccacgcaatgatagtcattgaggatttgaaggtcagcaacatgtcaaagtcagcagcgggtacggtcagccagccggggcgcaatgtccgggcaaaatcaggtttaaaccgttcgatactggatcagggctggtatgaaatgcgccgccagcttgagtacaagcagctctggcgtggcggtcaggtgcttgctgttccgccagcgtacacaagccagcgttgcgcgtgctgtggtcatacagcgaaagaaaaccgcctgtcacaaagtaaattcagatgccaggtatgtggatatacagcgaacgccgatgtaaatggcgctcgtaacattttagcggcggggcacgccgttcttgcctgtggagagatggtgcagtcaggccgcccgttgaagcaggaacccaccgaaatgattcaggcgacagcctgaacgtagcagggatcctcgtccttcagggcgtggaggatgtcaatatcggtttctgtcagcgattaaattcaacaccacgtaacaaacgcctccggcaattaatccccagaacgcagaaccaatcccgaccagcgtcaatccacttgccgttaccagaaatgccaccaccgccgcgtcgcgctcacgctcattatgcagcgcctgatacaaactgccgccaatggtactcaacagcgccagacctgccagcatctggatccaacttacgggcagggcagccatcatcccggtaatggcactaccaaacagacctgcgagcaaatagaaaatgcctgcaacggcagctgccagccaacgttgatctttatccggatgcgcttccgggctttggcaaatagccgcggtgattgccgcaataccgacggaataaacgccgaaaggggaaaaaaccagtgccagcaatccagtaaatacaattaatggcgaaacaggagccgaatatccagctgctttcatcgctgcgatacccggtgcgttttgcgatgccatcgtcaccagaaaaagggggagtgcaacgctcaggctgtgagcaaacgaaaaatcaggggtaatataagtggggagaacgggtttaaagacaacatcagttgtgacaacgtcaccttgcgcgataacgatcacgatcccaataatcatcgcggcaattaccgcatagcgcggcgcaacggccttggttgccagccataccagcaacatacttccacacaacgtaaattgaccgtccagactggcaaacgcctgtaaaccaaagcgtaataaaatcccggcaagcattgccgccgcaagcgagtgcggaataatgcgcatcagacgagcaaagagtcccgttatgccgcagaggactattaacgcgttggtgacaataaaaacgccgatggcttcgttaagtgttagtccctgcaatccggtgaccaacaaagccgcgccaggcgttgaccatgcggtgagaacaggtacgcgataccataatgtcagagtcagcgtactgacgcccattgccagccccagcgccgtcatccagccagagatttgtgcagtggtggctccggcgacaatcgctgcttgccagattattgccgctgaactggcgtagccaattaataccgccagaaaccccgccagtagcgtgggtggaggaatagaaaacagacgcatagtcacctcgtgcgttatagcgtacaggcaccgtagcatttgtccgttataacgcacaagtgataaacttccgttttgccggaggagtcgcatggaaaatctcgctcgctttttatccaccacacttaaacaactacgccagcagcgcggctggagtctttcgcgactggcagaagcgacgggcgtttctaaagcaatgttagggcagattgagcgtaatgagtccagcccgacggtcgcgacattatggaaaattgccaccgggttgaacgtaccattttcaacatttatttctccgccgcagcccgctacgccttcagtttatgatccacaacagcacgcgatggtgatcacttcgctgtttccttatgatccacaactctgctttgaacacttctcgattcagatggcatctggtgcaataagcgaatcgacgccccatgagaagggggtaatcgaacatgtcgtcgtcattgatggacaacttgatctgtgcgttgatggggaatggcagacccttaattgtggggaaggcgttcgatttgctgcagacgtcacgcatatctatcgtaatggtggggagcaaaccgtacattttcattccctcatccattacccgcgcagttaagcgggaaaactatttcgcaacgtcgcgcttgtggctaaaatagccgccatttttcagctactggataagaatgtgaccgtatcttctcatcgacttgaactgttaagcccggcacgcgatgccgccattgcccgcgaagctattttgcacggtgccgatgctgtttatatcggcggccctggttttggtgcccgtcataatgccagtaatagcctgaaagatattgccgagctggtgccgtttgcccatcgttatggtgcaaaaattttcgtcacacttaacaccattttgcatgatgatgagctggaacccgcgcaacggctgattactgacctctaccagaccggtgtcgatgcgctgattgttcaggatatggggattctggaacttgatattccgccgattgaactgcacgccagtacgcagtgcgacattcgtacagttgaaaaagcgaagttcctctctgatgttggcttcacgcagattgtgctggcgcgagagctgaatcttgatcagatccgcgcgattcaccaggctacggacgcgaccattgaattctttattcatggggcactgtgcgtggcctattcgggtcagtgctacatttctcatgcgcaaacagggcgtagcgccaaccgtggcgattgctcgcaggcgtgccgtttgccatacacattgaaagacgatcaggggcgggtggtttcctatgaaaaacatctgctgtcgatgaaagataacgatcagactgccaacctcggcgcgctgattgatgctggtgtacgctccttcaagattgaagggcgttacaaagatatgagctacgtgaagaatatcaccgcccattatcgccagatgcttgatgccattattgaagaacgtggcgatctggcgcgcgcttcatcaggtcgtactgaacatttctttgttccatcgacggaaaagactttccaccgtggtagcacagattattttgtgaatgcccgtaaaggcgatattggcgcgttcgattcgccgaaatttatcggcctgccggtaggcgaagtattgaaagtggcgaaagatcatctcgatgttgccgttaccgagccactggcaaatggcgatggcctgaacgtgttgattaaacgtgaagtcgtcggttttcgtgccaatacggtcgagaaaaccggagaaaatcagtaccgcgtctggcccaatgaaatgccagcagatttgcacaaaattcgtccacatcacccactaaaccgtaatcttgatcataactggcagcaggcactgacaaaaacctccagcgaacgtcgggtggcggtagacattgaactgggcggctggcaggaacaactgattctgaccctcaccagtgaagagggtgtcagcatcacgcatacgctggacgggcagttcgacgaagccaataacgccgaaaaagcaatgaacaatctgaaggatggtctggcaaaactggggcaaaccctctattacgcccgcgatgtgcaaattaatttgccgggggcgctgtttgtaccaaacagtctgttaaaccagttccgccgtgaagctgctgacatgctggatgctgcgcgtcttgccagttaccagcgcggcagccgtaaaccggttgctgatcctgcgccggtttatccgcaaacgcatctgagtttcctcgcgaacgtatacaaccagaaagcgcgtgaattttatcatcgctatggtgtgcagctgattgacgcggcgtatgaagcacatgaagagaagggcgaagtcccggtgatgatcaccaagcattgtctgcgctttgcctttaatctgtgcccgaaacaggcgaaaggcaatatcaaaagctggaaggcgacgccaatgcaactggttaacggcgatgaagtattaacgctaaagtttgattgccgcccatgcgagatgcacgtcattggcaaaatcaaaaatcacatactgaaaatgccgttaccgggaagcgtagtggcatccgtaagtccggatgagctgctgaaaacattgcctaagcgaaaagggtaaaacgccagttttctggttactcacaactcattgaatctgcatgatattgcctgccgggtaaggtgtcacgccgcatccggcaacaaatgactcaacgttgtcccgcttctggtttgcgcgatttttgccagtaaaaatgctcgcgcaaaccttccgccgactcttccgccacagcacgcaattcatcgctgtccgcttcatgacgcagctgatgatccacattctttacccacacaaattcatgtcctttgtgccctgccatgagttgtcctgagaacagcgcacacgttaataagacaaccgataacgccttcgtaaacatcctgccacctttttcttaccttttgccgctatgatgccgatcgtttcttgaggttattattcagttttgcaaattagcgcaaagaaattctggaatcttccttcctgattttgcatggcattctgccgttgcggcgatttagtgctattttcgagcaaattacacacggaggtaaacactaatgtttactttgttgatatactcagcggcagggaggcgatgtgaaacaaagcgagttctgacgttggctcgaatctcagggcgtcgatgtagcgaatggcagcaaccatttgaaactcaggtttcatgggaggcgcagtgtcatgccgcgtcactcctgcgtaaagcaatcctgaaacaactcggtttgagttaatcgccaattaaaaaggttaatgacatgcgagagacagtcgaaattatgcgttatcccgtcactcttacacccgcgccggaaggcggttatatggtttcttttgtggatatccctgaagcgttgacgcagggcgaaactgtcgctgaagcgatggaagcggcaaaagatgctttactgaccgcatttgatttttattttgaagataacgagcttatcccgttaccttcgccattaaatagtcatgatcactttattgaagtacctttgagcgtcgcctctaaagtattgctgttaaatgcttttttacagtcagaaatcactcagcaagagttagccaggcgaattggcaaacctaaacaggagattactcgcctatttaacttgcaccatgcgacaaaaatcgacgccgtccagcttgcggcaaaggcgcttggcaaagagttatcgctggtgatggtttaattacagttaacgaaaagttgtcatttttaacaactgatatagactgccgaatcatctgcacataattacgattcgataatgaaaaaataccagcagcttgcagaacaattacgcgagcagattgcgtcgggtatctggcaacccggcgatcgtttgccttcgttgcgtgaccaggtggcgctttcaggcatgagctttatgactgtcagccatgcctatcagttgctcgaaagtcagggatatattatcgcacgaccgcagtcgggttattacgttgcgccacaggcaataaaaatgccgaaagcgccagtcattccagtcactcgagatgaagcagtcgatatcaacacttatatttttgatatgttgcaggccagtcgcgatccgtcggtcgttccgtttgcctcggcctttcccgacccgcgacttttccccctccaacaactaaaccgctcgctggcgcaggtaagcaaaaccgccacagcgatgagcgtgattgaaaacttaccgccaggaaacgcagaactgcgtcaggctattgctcgtcgctatgccttacagggcatcaccatttctcctgatgaaattgtcattactgccggggcgttagaggcattaaacctcagtttgcaagcggtaactgaaccgggcgattgggtgatagtagagaatccttgtttctacggtgcgttgcaggcgctggagcggctacggctgaaggcgttatcggtggcgacggatgttaaagaagggatcgatcttcaggcgctggaactggcgttgcaggattatccggtgaaagcgtgctggctgatgactaatagccagaacccactcggatttaccttaacgccgcaaaaaaaagcacaactggtggcgttactcaatcagtacaacgtaacgctgattgaagatgacgtttacagcgaactttattttggacgggaaaaaccgctgcctgcgaaagcgtgggatcgccacgatggcgttttgcattgctcttcgttttcgaaatgtctggtgcctggttttcgtattggttgggtcgccgccggaaaacatgcacgtaaaattcaacgcttgcagttgatgagtacgctttccaccagctcaccgatgcaacttgcgctggtggattacctttccacgcgccgatacgacgcccatcttcgtcgcctgcgtcgccagcttgcggaacgtaaacaacgtgcctggcaggcactgctgcgttatctgcctgcggaagttaaaattcatcatagtgacagcggttattttctctggctggagctccccgagccgttagatgccggcgaattaagcctggcggcactgacgcatcatatcagtattgcgccgggtaaaatgttttctaccggtgaaaactggtcacgtttttttcgttttaataccgcgtggcagtggggagaacgtgaagaacaggcggtaaaacaattaggcaaacttattcaagaacggctgtaatagcgtttaatttaattcctcttagattgggtaatatgaatttcgaatagcagtcatatttcctaaccccttgtctatactccagaagataaccttacagacggcataatgcgcggtagctcacaacctgattaaattttctcaggggcgaaggtgtgcctgcaagccgccgtctatggttaaacaaggagatatttttacggcacggcggctgaacaattaattacgacaggagtaagaccttatgagcaagacatttgcccgcagcagcctgtgtgcgctcaccatgacaataatgaccgctcacgccgccgaaccacctaccaatttagataaaccggaagggcgactggatattatcgcctggccgggatacatcgaacgcggacaaactgataaacaatacgactgggtaacgcaatttgaaaaagagacaggctgcgcggtgaatgtgaaaaccgccgcgacttccgatgaaatggtcagtctgatgaccaaagggggttacgatctggttacggcatccggcgatgcctcgctgcgtttgattatgggcaaacgcgtgcagccgattaataccgccttgattcccaactggaaaacgctcgatccgcgcgtggttaaaggcgactggtttaatgttggcggcaaagtttacggcacaccttaccaatgggggccgaacctgctgatgtacaacactaaaaccttcccgacgccgccggatagctggcaagtggtttttgttgagcaaaatctgccggacggcaagagcaataaaggccgcgttcaggcttatgatggccctatctacattgcggacgctgcgttgttcgttaaagccactcagccgcagttgggcatcagcgatccgtatcaactaaccgaagaacagtaccaggcggtgctgaaagtgctgcgcgctcaacacagtttgatccatcgctactggcatgacactaccgtgcaaatgagcgatttcaaaaacgagggtgtggttgcttccagtgcctggccctatcaggccaacgccctgaaagccgaaggccagcctgttgctaccgttttcccgaaggagggtgttaccggttgggctgataccaccatgctgcatagcgaagcgaaacatccggtttgcgcctacaaatggatgaactggtcattaacgccaaaagtgcagggcgatgtggcggcctggtttggctcgttaccggtagtgccggaagggtgtaaagccagtccgttattaggcgaaaaaggttgtgaaaccaacggttttaactatttcgacaaaatcgccttctggaaaacgcctatagcagaagggggcaagtttgttccctacagtcgctggacgcaggattacattgccattatgggcggtcgctaacttcgctggggtgctttatgacgtacgcagtggagtttgacaacgtctcgcggttgtacggtgacgtgcgcgcagtagatggcgtcagtattgcgataaaagatggtgagttcttctctatgctggggccgtccggctccggcaaaaccacctgcctgcgcctgattgctggcttcgaacagctttccggcggggctatctctatctttggtaaacccgccagcaatctgccaccgtgggagcgggacgtgaatactgtctttcaggactacgcgctatttccgcatatgtcgattcttgacaatgtcgcctatgggctgatggtcaaaggcgtgaataaaaagcagcggcacgcaatggcgcaagaggcgctggagaaagtggcgttggggtttgtacagcaacgtaaaccgtcacaactttctggtggtcagcgccagcgggttgctatcgccagagcattggtgaatgaaccgcgcgtattgctgttggatgaaccgctcggcgcactggatctcaaattgcgtgagcagatgcagctggaactgaaaaaactgcaacagtctctcggtatcacttttatcttcgttacccacgatcagggcgaagcgttatcgatgtccgatcgtgtggcggttttcaataatggacgcattgagcaggtcgattccccgcgcgatctctatatgcgcccgcgcacgccgtttgttgccggattcgtcgggacatccaacgtttttgatggactgatggcagagaaactttgtggcatgacgggaagcttcgccctgcgaccggaacatatccgcctcaacacccctggtgaactgcaggccaatggcacgatccaggcggtgcaatatcagggcgcggcaactcgttttgaactgaaattgaacggcggtgaaaaactgcttgtgagtcaggccaatatgacaggcgaagaactgcctgccacgctcacgcccggacaacaggtgatggtttcctggtcgcgtgatgtgatggtgccgctggttgaggagaggtgaatggcgatgaatgtattgcaatcaccttcacgtccaggtctgggtaaggtgtccggtttcttctggcgtaatccggggctggggctgtttttactgctgcttggcccgctaatgtggtttggcattgtctatttcggctcgctgctgacactgttatggcagggattttatacttttgacgatttcaccatgtcggtaacgccggaactgacgctggcgaatatccgtgcgctgtttaatccggcgaattacgacatcattctccgcacgctgactatggctgtggcagtcactatcgccagcgccattctggcttttccaatggcgtggtatatggcgcgctataccagcgggaaaatgaaagctttttttatattgcggtaatgttgccgatgtgggcgagctacattgttaaagcctatgcctggacgttattgctggcaaaagatggcgtggctcagtggtttttacaacatcttgggctggaaccactgctgactgcgttccttacattacctgcggtgggcggaaatacgctgtcaacttccgggctggggcgctttctggtgtttctctatatctggttgccgttcatgatcctgcccgttcaggcggcgcttgagcgtttgccgccgtcattgttgcaggcgtcggctgatctcggcgcacgtccacgacaaacctttcgctatgtggtgctgccgctggcaatcccgggtattgccgctggctctatctttaccttctcactcacactgggcgattttatcgtcccgcagctggttggtcctccaggatattttatcggcaatatggtttattcccagcagggggcgattggcaatatgccgatggcggcggcattcaccctggtgccgattgttctcatcgcactgtacctggcgttcgtgaaacgtctgggagcgttcgatgcactctgaacgcgcaccgtttttcctcaaactggcggcctggggcggcgtggttttcctacattttcccatcctgattatcgccgcttatgcgtttaacactgaagatgcggcgtttagttttccaccgcagggcctgacgctgcgctggtttagcgtggcagcacagcgtagtgatattcttgatgccgtgacactgtcacttaaagtggcggcgctggcgacattaatggcgctggtgttagggacgctggcagctgccgcgctgtggcgacgagactttttcggcaaaaacgccatttcgctgttactgctgctgcccattgcgctgccgggcattgtcactggtctggcgctattaaccgcttttaaaaccatcaatctggagccgggatttttcaccatcgtggtcggtcatgcgactttttgcgtagtggtggtgtttaacaatgtcatcgcccgttttcgccgcacctcgtggagtctggttgaggcgtcaatggatcttggggccaatggctggcaaaccttccgctacgtagtgttgccgaatctcagttcggcgctactggcaggaggaatgctggcgtttgccttgtcgttcgatgaaatcatcgttacgacttttacggcaggtcatgaacgaacgttaccgttgtggttgctcaatcagcttgggcgaccgcgtgatgtaccggtaactaacgtggtggcactgctggttatgttggtaacaaccttgccgatcctgggggcctggtggctaacccgcgaaggcgacaatggtcaataaccactgatacaggaatatgctatgcaacataagttactgattaacggagaactggttagcggcgaaggggaaaaacagcctgtctataatccggcaacgggggacgttttactggagattgccgaggcatccgcagagcaggtcgatgctgctgtgcgcgcggcagatgcagcatttgccgaatgggggcaaaccacgccgaaagtgcgtacggaatgtctgctgaaactggctgatgttatcgaagaaaatggtcaggtttttgccgaactggagtcccgtaattgtggcaaaccgctgcatagtgcgttcaatgatgaaatcccggcgattgtcgatgtttttcgctttttcgcgggtgcggcgcgctgtctgaatggtctggcggcaggtgaatatcttgaaggtcatacttcgatgatccgtcgcgatccgttgggggtcgtggcttctatcgcaccgtggaattatccgctgatgatggcagcgtggaaactggctccggcgctggcggcagggaactgcgtagtgcttaaaccatcagaaattaccccgctgaccgcgttgaagttggcagagctggcgaaagatatcttcccagcaggcgtgattaacgtactgtttggcagaggcaaaacggtgggtgatccgctgaccggtcatcccaaagtgcggatggtgtcgctgacgggctctatcgccaccggcgagcacatcatcagccataccgcgtcgtccattaagcgtactcatatggaacttggtggcaaagcgccagtgattgtttttgatgatgcggatattgaagcagtggtcgaaggtgtacgtacatttggctattacaatgctggacaggattgtactgcggcttgtcggatctacgcgcaaaaaggcatttacgatacgctggtggaaaaactgggtgctgcggtggcaacgttaaaatctggtgcgccggatgacgagtctacggagcttggacctttaagctcgctggcgcatctcgaacgcgtcagcaaggcagtagaagaggcgaaagcgacagggcacatcaaagtgatcactggcggtgaaaagcgcaagggtaatggctattactatgcgccgacgctgctggctggcgcattacaggacgatgccatcgtgcaaaaagaggtatttggtccagtagtgagtgttacgcccttcgacaacgaagaacaggtggtgaactgggcgaatgacagccagtacggacttgcatcttcggtatggacgaaagatgtgggcagggcgcatcgcgtcagcgcacggctgcaatatggttgtacctgggtcaatacccatttcatgctggtaagtgaaatgccgcacggtgggcagaaactttctggttacggcaaggatatgtcactttatgggctggaggattacaccgtcgtccgccacgtcatggttaaacattaagttagatgttagtggctgttataggacggccactatcgttttaggttctgagtttaatggcggttaagtattagaatgattacattaataactagcgtaaaaattaggctaaatgtttgatggcgatttttcatcctgtcacagttgattagcataaggctttagagtatcgttattaaactaataatttataagtagaagtattaacaatgaaagttcaattgtacaaattcacggaagataaaaataaaacccttaccttcagatggacgaaaaaacactttgagttttgtatggataataaaatctttttaaatcataaggggaagaagtcgtataaagaaaggaatttatttcttttctcaaaaggtgacaagataacaattgaagataatgttattgctgaagaatattcaacaatgcctgtgaaaaatttctccagtgtcggcgctttttcatttccgacctgccatttttcagggaatatacgtataggtcgattttgtagtattgcatcaaatgtaaaaataatgggtggaaatcatcctttgaatcgttttactactcacatgatgacttataacggtgaatttgataagtttgctatgagtgaatttgaacgtagctggacattgaaaccattcattaccaaacctgaaaatccgattataggaaatgatgtctggataggaaatgatgttgtattgaaaggtggcatcgcaataggtgatggtgctgttattgctgccaattccgttgttaccaaagatgtgcccccatatgccatagttgcaggagttcctgcaaaaataatcagatttaggtttgattcaaatgttattgatgaactgttgagaataaaatggtggaattataactactcagatcttccggataataacaagtgtgatgatataaattattttgttgaagagatgaatcgattgatatcagatggaaatattcaagagagggactataaaaaattcaatctttctgaggtattcagaggcctataattatctgttttgcatgataaatgggcaagataaccagggcggggtttgcaatttcaatggggcagcgtcatcaaggaggttgcaaacatcctgccatgcatatactttacgccatctttttatatttacgttattccttgaaagtataaagcatttatagactcccgcgcgtataaagtattcatgatagaaaaatgtgaaaacaagattccgtttgaatcagtaagctgtttgtatagacgacagtagggggatgttttctactcatttcaatgtagatgccagcaaaaagaagtaaatattaaggataatgttgtaaacctggagagtatgagaagatcttgcgtactgtcagagagttgatttctctgacagtacgtgctgcgtgcaaaatcactacatcaaataaaccagccaaatctcatagagataagagtaaacaaaccaacagcagcaaagacatttatcagtactacagttctactggaaacattcatttttgccaccttttatcattgcccctatgtgtatagtacgggttaagaaaatccgcaataatactcattctgaagatggataagggcaagttgctgtttgatgattttttctcaaactggtgaaaaaacttgatgcacgtcaaaaaatgacgcatatttgcgcgcgttttattcatctgcctggacgcccgtacatgtctctctatcaacatatgcttgttttttatgcggttatggcagcaatcgcatttcttatcacctggtttctttctcacgataagaaacgcatccgtttcttaagcgcctttctggtgggggcaacatggccgatgagtttcccggtggcgctgttgttttcactgttttaaatcttactcactggcttgacggcaccacgcagacttatatcatttggatgaatcgataaatttcacaagtggttaaggagaaagtatgtcgcatctggatgaagtcatcgcgcgcgtggatgccgcgattgaagagagcgtcattgcccatatgaacgaattattaatcgccctgagcgatgacgcggagttaagtcgggaagatcgctacacccagcagcagcgtttgcgcaccgctattgctcatcacggtcgcaagcataaagaagatatggaagcgcgccacgaacagttaaccaaaggcggcaccatcctctgattaaaatgagcgtctggctaccaaccaggcgccaaccacaagtaaaattgcgccacaaattgggccgaacaacgcccgtagtggtacgccatgactgcggaagatatccagcatcagaccgccaattagctggctggcgaccagtactgcaatagttgtcgccgctcccacattctgatatccgctgatactggcgaagacaaaaaacgatcccagcaagccgggtataagtgtccaccagcgcacgctggacaccagttcgccaaaccccgccatgccttgtttaaaccataaaatagaaacaaagagcacaatccccaccagtgagttcagcaacatggcgatgagaatggtagaggaggtctgggtgatgcgcaccatcagcgtgttctggactaccagaccaattccggcggcaatcaaaaaagcaagggtgagcgactgattcatccaatcgcgtccggttcagtgcgttcgtcgagttgcaactgcataaatgtcagatccagccagcgcccaaatttagtgcccacctgcggcatttgtgcggtgacgacaaatcccagcgactggtgcagatgcagcgaggcctgattttgcgattcgatcccggcgaccatgacatgcttcccgcaatcccgcgcttcatcaatcaatcggcttaacaatttacgccccagacctttgccctgatgatcaggatggacataaaccgaatgttccacggtatggcgaaaaccatcgaaactacgccagtcgccaaacgaggcatatcccgtcactacgccatcttcttcactcaccagcaccggataacctgctatggtccgcgcttcaaaccaggcaatgcggttatctgcatcaaccgtttggtcattccagatagccgccgtatacaacacggcgtggttataaatttccgcaatggcagcacaatcggctttgcgggcaaaacggatggacatgtctggcctcgataaaataatgatgatgatgttatcaatactatcgaaaacagcccgaagcaacggattcctcgatgaaattattgcgtgttgcagaggggatgtgacggctgcaaacaaaaccaatcccgtgagcctgctactattgatggattcatgccaaaagcacaggagagcattatggggcaacaaaagcagcgtaatcgacgttgggttctggcctcgcgtccacatggcgcaccggttccggagaatttccgtcttgaagaagatgatgtcgccacaccgggtgaaggacaggtgttactgcgcacagtttatttgtccctggacccgtatatgcgtggacgtatgagcgatgagccatcttattcaccgccggttgatattggcggcgtgatggtcggcggtacggtgagccgtgtcgtggagtcgaatcatcctgattatcagcctggcgactgggtgctgggctacagtggatggcaggactatgacatatccagtggtgatgatctggtgaaacttggcgatcatccgcaaaatccatcgtggtcgctgggtgtgctggggatgccaggctttaccgcttatatggggctgctggatatcggtcagcctaaagagggcgaaacgttggtggtagctgcggcgacaggaccagtgggggcgacggtggggcaaatcggcaaacttaaaggttgcagggtggtgggggttgccggtggcgcggaaaaatgccgccatgctatcgaggtgctgggcttcgatgtttgtcttgatcaccacgcggatgattttgccgaacaactggtgaaagcgtgcccaaaaggtattgatatctattatgaaaacgtgggcggtaaggtatttgatgcagtgctaccattacttaatacatctgcgcgcattcccgtttgtggcttagtgagcagctataacgctacagagctaccacccggtccggatcgtttacccctgttgatggcaacggtgctgaaaaaacgtattcgcttgcaagggtttattatcgctcaggattatggtcaccgcatccatgagtttcagaaggagatggggcaatgggtgaaagaggataaaatccactaccacgaagatattactgatggtttagagaatgcgccacagacgtttatcggcctgctgaagggtaaaaacttcggcaaagtggtgatccgcgtcgcgggtgatgattaaagtttcaacggcggcgtaagccgccataaaaatccaggcaaaaagcttattttcagctttaattaactaaccacgtcattgttctgctgctaataacaacaaaggtgggtggtttatgattattcactttaatacaccaggtgaactccttctgccgtgcaggcagggttggacagaaaacacgcgaaggaattaaaatgcctggaatgggaaaaatgaaacatgtcagtttgactctgcaggttgagaacgacctgaaacatcagcttagtattggcgcattaaaacctggcgcacgcctgattactaaaaatctggcggagcaattaggtatgagtattacacctgtgcgtgaagcattattacgtctggtttcggtgaatgcgctttctgtcgcacctgcacaagcatttacagttccggaagtggggaaacgtcaattagacgaaatcaatcggatccgctacgaactggaattaatggcagttgctctggctgttgaaaacctcaccccgcaagacctggcggaactccaggaattgctcgagaaattacagcaggcgcaagaaaagggcgacatggaacaaatcattaatgtaaacaggctatttcgcttagcgatttatcatcgctcaaatatgcccatcctgtgtgagatgattgagcaactgtgggtcaggatggggcctggtttacattatctctatgaagcgattaatccagcggaattacgggagcatatagaaaactatcatctgttactcgctgcgttaaaagcaaaagacaaagagggatgcagacattgtcttgctgaaattatgcaacaaaatattgctattttataccagcaatacaatcgttaaagtaaatgcccggcaaataccgggcatcaaggtaattactcaaatctccacgcaatattcatgccggcaccataatttcgtccgggcgaaggttcgtaatatcgcccgtttgactcattgacaatgacagaaccaacgtattctttatcgaataaattatcgacacgaccaaataaatccacagttaaattgtggtaattgtatttatacccggtgaataagccgacgagagtataagacggcgcttttgccgtattttcatcatctgccataatatcgcccatataacgcgcttccgtgcctgcataccaaccatcttccggtacataacctatcgacgcaaagcccatattacgggcgatccctggcatccggttaccgttacaatcctgttcattgcaaacattgctgcgataggtcgcatcaagccaggtccaggacgcttttacgcgaaaatctcccgcgaaacgttgatcccatgccagttcagcgccttgacgacgggtctttccggcatttttgtaagtcgtacgcccaccgctactgctatcgacaacaatttcatcatcagtgtcggtctgaaacaatgcgagactaagcagcccatcaccaatacgcgttttactgccgatctcaattgtatcgttggtggatggttttaaaccaaagttcataccgctttgcccatcagcgcgataagacagctcattaatcgtcggcgtttcaaaacctcgcccggctgccagatagatattccaggcatcggtcattgcatattttaacgaaccggcaggtagccatttatgataactggcatcaccgctgtcatcgccgttacccggagtaacgtaatgatcattggaatcaaaccacacggagctgtagcgcacgccagcatccagcgacagtttttcgctcagctgccactgcgtctgtaaatagggatcgatgttccacatcagattgcgttcgtcgcgacgcaactcacctttttgcccgtactccggcatgccgctattcaggcggaagttattgtagcccttgcggttttcactcatgttttcgtagttcaggccggtagtgaacgtgaccggaacgcccagttcaccacggtgtgtccagcggctgtctatcccctggtaatggcgttgcagggtaatcacgccgcccgcatgtgacgggttaagttgtggtgccatgggtattgactgatactgggtcgtttctcgctctccggcatacatcatcacactcatatcatcttgcgcgctcaggctacgctcatagcgcaacccagcctgagtttgcttgatggtttttcgcgtgtcgtactgttctgcacgaggcgcttgttgtggattagccttccattctgctttggttagcccacctgggtcatctgctttgatatccacactattgaaaatcagacttaatttgctggcttcatcaatgcgtacgcccagtttggcattagctaaatttttctgtgcgccactatggtcacgatagccgtgggtcgtaaaacgcgtggttgagacggtgtaatcgacatcgccaggctgtgtgccgtctcccgttgcgcccgttgctttcagcccatagcgccagctgccaaaactgccgtagtaactactggcttcaatggttggtggctgttgtccggtctgggtggtgacattcattaccccaccagacgcgttgccatacagggcagagaaggggccacgcagcacttccacattttgcacactgcttaaatcgatgttggatgtttgcccttgcccgtcgggcatggtggcgggaataccgtccacatacaggcgaataccgcgaataccgtaagtggagcgggagccaaatccgcgaatcgacagctgtaaatcttgcgcatagttctgccggttttgtacctgcaaaccaggcacgccggtcagtgattcggacaagttaatgcgcggtgttgccaggcgcatctcctcgccatccaccacgcttactgctgctggggtatccagttctgaaaccacctgcggtgcggcactgacaatcatagtctgttcatcagcggcaaaaacaacgggggaaaggacaagcagtgcgggcaaaacggtctgtcggacggaaaaaatcttcatgaaaaaagccaggttaagaatgggaaaacgctgtcatggtaataaaattgtaaatttatggaaaacgaaacggcacgatacgttaattaattgagaaaattgtagtcgtaacggcaagaaatgctccacatttgagaaaataatgattaccattcccatttataacaagagcgtaacgatgattacgcttagcgaagcattgtgaagcagcaaaaatattggttcatcaaagggagtcgtcatgcatttacgtcatctgttttcatcgcgcctgcgtggttcattactgttaggttcattgcttgttgcttcatcattcagtacgcaggccgcagaagaaatgctgcgtaaagcggtaggtaaaggtgcctacgaaatggcttatagccagcaagaaaacgctctgtggctcgccacttcgcaaagccgcaaactggataaaggcggcgtggtttatcgtcttgatccggtcactctggaagtgacgcaggcgatccataacgatctcaagccgtttggtgtcaccatcaataacacgactcagacactgtggtttggtaacactgtaaacagcgcggtcacggcgatagatgccaaaacgggcgaggtgaaaggccgtcaggtgctggatgatcgtaagcgtacggaagaggtgcgcccgctgcaaccgcgtgagctggtagctgacgatgccacgaacaccgtttacatcagtggtattggtaaagagagcgtgatttgggtcgttgatggcgagaatatcaaactgaaaaccgccatccagaacaccggtaaaatgagtaccggtctggcgctggatagcaaaggcaaacgtctttacaccactaacgctgacggcgaattgattaccatcgacaccgccgacaataaaatcctcagccgtaaaaagctgctggatgacggcaaagagcacttctttatcaacattagccttgataccgccaggcagcgtgcatttatcaccgattctaaagccgcagaagtgttagtggtcgatacccgtaatggcaatattctggcgaaggttgcggcaccagaatcactggctgtgctgtttaacccagcgcgtaatgaagcctacgtaacgcatcgtcaggcaggtaaagtcagtgtgattgacgcgaaaagctataaagtggtgaaaacgttcgatacgccgactcatccaaacagcctggcgctgtctgccgatggcaaaacgctgtatgtcagtgtgaaacaaaaatccactaaacagcaggaagctacccagccagacgatgtgattcgtattgcgctgtaatagatatggcgagggtgaaaacggtgagacttgcctgccttttatcacggcgtatccggcactttcgtcagtaatctgaatttgcccggcacgtagccgggcaattttgcaattaactcgccgtttcaggcttaaacacaatttcctgtttttcttcatcttcctcgacgactggcgcagtgctgtgaatttcagcaacgcgtttgcgcacaccaaaccagcctataaccagcagaataccgataatcggcagcgccgcgatagtataagtcccgttcgggtaatcgaacgccatcagcacaaggacactcagtaaaaacagtaatgtcagccaggaagtgaagggcgcgccaggcagtttaaaactgacatccgctgctttgccttctttaatcgctttacgcaggcgcatctggcacacgatgataaacgcccatgaagcgatgattcccagcgacgcgaagttcaacacaatctcaaatacgcgcgacggcaccagatagttgaggaatacgccgacgacatacacaaccagtgtcgctagaatcccggcatacggcacatgctgacgactcattttcgccataaaactcggtgcggaaccgcccatcgccattgagcgcagaatacgtccggtgcagtacagacctgagttcaggctggagagggcagcggtcagcaccacaatgttcataatgctgccgatatatggcacacccagtttagagaaaaacgtcacgaacggactttgccccgcctgatacgcgctccacggcaataacataaccagcaacaccacggagccgacgtaaaacaggccaatacgccaaatcacactgttaatggctttaggcaccatggtctgcggatctttacattctccggcagctgtacccaccatttcaatggaggcaaaagcaaacactacgccctgaatcaacaccagcgcaggcagcaaaccgtgggggaagaagccgccattatcggtgattaaatgaaagccagtggtgttgccatccagcggctgaccactaccgaggaacactgtacccacgaccaaaaaggtcacaatggcgagcactttaataagcgcaaaccagaactccatctccgcaaaccatttcacaccgatcatattcatggtgccaacgatggtaagtgcagcgagcgcaaagacccactgcggcacgccgccaaacgcaccccagtaatgcatatacagagcgacggcggtaatatcaacaatccccgtcatcgcccagttgatgaagtacatccagccagcaacataagcggctttctcacccaaaaactcacgggcataagagacaaaactgccactggaagggcggtgtagcaccagctcacccaatgcacgcagaataaaaaacgaaaacaagccacaaattaaataaaccagtgccagtgctggacccgccatttgcagtcgggctcctgcacctaaaaacaagccggtgccaatcgcgccgccaatggcgatcatctgtacctggcgattgcccatcgctttgtgatacccctcttcgtgggcattaagccagcggcgtttcgcggcgtgttgatctgaagtgtcggtgtcgtgtttactcattgctctccctgattgctttaatgaaaaagtcatataagttgccatgaacaatgtttattcatcctggcgatgatagttaacaccattattctttatgggtataaaactatcggcgcagcatcctacccgttatcgataaacgatgcaaaacatccccttacaatcctgaaggggattaatacaactgacgaaaaaatgacaaatccttttgctggttaacctgtgtactgtcctacacttaatctttaaaagattgtgaggggcatatgattaaggtgtatggcgtacccggatggggctctacaatcagtgagctgatgctaacactggctgatattccttatcagttcgttgatgtcagtggttttgaccacgagggaacttcacgcgagttattgaaaaccctgaacccgttgtgtcagattccgacactggcgctggaaaatgacgagattatgacggagacagcggcgattgcattgatggttctcgatcgtcgcccggaccttgcgccaccggttgggcgcgccgaacgtcagcagtttcaacggctattggtctggctggttgctaatgtctatccaacattcactttcgccgattaccctgagcgttgggctcctgacgcacctgaacagttaaagaagaatgttattgaatatcgtaaatcgctttatatctggctgaattcacaattgaccgctgaaccttatgcgtttggtgagcaactaacgctggtggactgttatctctgcaccatgcgcacatgggggccggggcatgaatggtttcaggataatgcgcagaatatcagcgcgatcgctgatgctgtatgtcagttaccgaaattacaagaagtattaaaaaggaatgaaattatttgagtgggataccagaagattatgttatttattattcagtaactttatccacaatgatgggtgtaattaattaaattcatgttatgttttttgatttatatcactctccccttcattcagcttgtctatttcatttcctctgaaaagaaactaactattcacattgtgcagatgtttcacttgttatcacaggtattctataatctcaaaaagtttttaatgatggatatgctcggagttggagatgcaattaatattaatacaaataaaaatatccggcaggtatgctaaaaggataaatggcgttctctgtatttattcgcaattatctgtaggacaaatatggagagcttgatgagtcagagctaaaacagcaattgattaataaacatgttgatttattcaagaaaatggatgtattttaaatgttgattcttaatataacctaatcaatagattatcaagtgagagctacacattattggaggggcaggggaaaacaccattttgggaacaatgcatcaggtactcttaccactgaagcaagatcatccggcaccaggtggtggtgcagtgctttggaaatggtcccctcgggggagttgtcattattttctatgctatttgcttattatattcatcaggtgaatttaataaattcctaatttgaaatatccactattaagccagtgtttaacgacgttaagatggcaatgtgcagatcatgttatcagggtggggcggtagcgtatattccttatacaaaccatcattcatttcaatgattgttattgaattatttattgttgtggataaaaagacattatgaatattggtttgactttgcatatcaggttttttattactcgctgtaatgtacgagcctgtcgtgaataacgtcgagaacccatccgttgcgtttgtgattattttgttgactaaacagacacccgtttctctgaagtaaaatcccagactaaatcatcacataaccatgacatttttctgatattccccggtaacgccagatgtcgactcgcttatctcatccgcccgacatgttgtacatgcaatatgtgcggattattattcattttcacggaggttgctatgtcaaccggattacgtttcacactggaagtggacggcctgccgccggatgcttttgcggtggtttcctttcatctgaaccagtcactctcttcgctcttttccctcgatctctccctggtcagccagcagtttctctcccttgaatttgcgcaggtgctggacaaaatggcctacctgacgatatggcagggcgatgaagtacagcgccgggtgaaaggcgtggtgacctggtttgaactcggggagaacgacaaaaaccagatgctgtacagcatgaaggtgcacccgccgctgtggcgtgccggtctgcgccagaacttccgtatcttccagaacgaggacatcaaaagcatcctcggcacgatgttgcaggaaaacggggtgaccgaatggagtccgctgttcagcgagccgcatccttcccgtgagttttgtgtccagtacggtgagactgattacgatttcctgtgccggatggcggcggaggaaggcatcttcttttatgaggagcatgcttacaaaagtaccgaccagagcctggtgctgtgcgacacagtccgccatctgcccgaatcttttgaaatcccatggaacccgaacacccgtaccgaggtgagcaccctctgcatcagccagttccgctacagcgcacaaatccgcccttcttccgtggtgaccaaagactacacctttaaacgccccggctgggccggacgttttgatcaggaaggccagcaccaggattaccagcgcacacagtatgaagtgtatgactaccccggacgtttcaagggggcccacgggcagaactttgcccgctggcagatggatggctggcgaaacaacgccgaagtggcgcgcggaacaagccgttctccggagatatggccgggacggcgaattgcgctgacggggcatccgcaggcgaacctgaaccgggaatggcaggtggtggcgagcgatcttcacggcgaacagccgcaggcggtaccgggacgcagtggttcaggcaccacgctgaataatcactttgcggtgatcccggcagacagaacatggcgaccacagccgttgctgaaaccgctggtggacggcccgcagagcgctgtcgtgacgggaccggcaggcgaggaaatcttctgtgatgaacatggccgcgtgcgggtgaaatttaactgggaccgttataacccgtcaaaccaggacagttcatgctggagccgtgtggcacaggcgtgggcaggcaccggattcggtaacctggcgataccgcgtgtgggtcaggaggtgattgtggacttcctcaacggcgatccggaccagccgatcattttggggcgcacctaccaccaggaaaaccgcacacccggcagcctgccgggaacaaagacgcagatgaccattcgttcgaaaacctataagggcagcgggtttaatgaactgaagtttgacgatgcgacagggaaagaacaggtctacawccacgcgcagaagaacatgaacaccgaggtgctgaataaccgcaccactgatgtgataaacaaccatgctgaaaccattggcaacaatcagatgattgcggttaccaacaatcagatacagacggtgggtgttaaccagatagagacggtgggcagtaaccagataattaaagtgggttctgttcaggtggaaacgattggacttgttcgtgcgctgaccgtgggcgtggcgtatcagacgacggtaggtggcattatgaacacctcggtggcactgatgcagtcctcgcagatgggtttgcataaatcgttgagggtcgggctgggttatgacgtcaaagtcggaaataacgttaccttcaccgttggtaaaacgaaaaaggatgataccgggcagaccgcgatttactccgccggtgagcatctggagctctgctgtggtaaggcaaggctggtgctgacgaaggacggacaaatttttctcaacggcacaaaaattcatttgcagggtaaggagcaggttaatggtgactcactgttgattaactggaactgtgcagcctcgaaatccccaccgaagacccctgatgaaaagcaggatacgccggatatgagagagtactgatcccgtacctgttcggaattcagtaacaaaccagcattaaaaataaacagaagaaggaatttgaatcatgagcggaaaaccagcggcgcgtcagggagatatgactcagtatggcggtcccattgtccagggttcggcaggtgtaagaattgggcgcgccaactggcgtggcgtgctcggtgtgtccgggcgggatgacttcgggcaacccggtaaatccgctgctgggggcgaaggtgctgcccggcgagacggaccttgcgctgcccggcccgctgccgttcattctctcccgcacctacagcagctaccggacgaagacgcctgcaccggtgggcgttttcggccccggctggaaagcgccttctgatatccgcttacagctacgtgatgacggactgatactcaacgacaacggcgggcggagcattcactttgagccgctgctgccgggggaggcggtgtacagccgcagcgagtcaatgtggctggtgcgcggtggtaaggcagcgcagccggacggccacacgctggcgcggctgtggggggcgctgccgccggatatccggttaagcccgcatctttacctggcgaccaacagcgcacaggggccgtggtggatactggggtggtcagagcgggtgccgggtgctgaggacgtactgccagcgccgctgccgccgtaccgggtgcttaccgggctggcagaccgtttcgggcggacgctgacgtaccggcgtgaggccgcaggcgacctggccggggaaatcaccggcgtgacggacggtgccgggcgtgagttccgtctggtactgaccacacaggcacagcgggcggaagaggcccgcacctcttcgctatcttcttctgacagttcccgccctctctcagcctcaccgttccccgacacactgcccggtaccgaatacggccccgacaggggcatccgtctttcggcggtgtggctgatgcacgacccggcatacccggaaagcctgcccggtgcgccactggcgcggtacacgtatacggaagccggtgaactgctggcggtatatgaccgcagcaatacgcaggtgcgcgctttcacgtatgacgcgcagcacccgggccggatggtggcgcaccgttacgcgggaaggccggagatgcgctaccgctacgacgataccgggcgggtggtggagcagctgaacccggcaggcctgagttaccgctaccagtatgagcaggaccgcatcaccgtcacggacagcctgaaccggcgtgaggtgctgcatacagaaggcggggccgggctgaagcgggtggtgaaaaaagaactggcggacggcagcgtcacgcacagcgggtatgacgcggcaggaaggctcacggcgcagacggacgcggcgggacggcggacagagtacggtctgaatgtggtgtccggcgatatcacggacatcaccacaccggacgggcgggagacgaaattttactataacgacgggaaccagctgacggcggtggtgtccccggacgggctggagagccgccgggaatatgatgaaccgggcaggctggtatcggagacatcgcgcagcggggagacagtacgctaccgctacgatgacgcgcacagtgagttaccggcgacgacaacggatgcgacgggcagcacccggcagatgacgtggagccgctacgggcagttgctggcgttcactgactgctcgggctaccagacccgctatgaatacgaccgcttcggccagatgacggcggttcaccgcgaggaaggtatcagcctttaccgccactatgacaaccgtggccggttaacctcggtgaaagacgcacagggccgtgaaacgcagtatgagtacaacgccgcaggcgacctgactgccgttatcaccccggacggcaaccggagcgagacacagtacgatgcgtggggaaaggcggtcagcaccacgcagggcgggctgacgcgcagtatggagtacgatgctgccggacgtgtcatcagtctgactaacgagaacggcagccacagcgacttcagctacgatgcgctggaccggttggtacagcagggcggctttgacgggcggacgcaacgttatcattatgacctgaccggaaaactcacgcagagtgaagatgaggggcttatcaccctctggcactacgacgcgtcggaccgcatcacgcaccggacggtgaacggcgacccggcagagcagtggcagtatgatgagcacgggtggttaaccaccctcagccataccagtgaaggccaccgtgtcgctgtccactacggctacgacgataagggccgcctgacgggcgaacggcagacggtggagaacccggagacgggggaactgctgtggcagcatgagacgaaacacgcctacaacgaacaggggctggcaaaccgcgtcacgccggacagcctgccgccggtggagtggctgacctacggcagcggttacctggcgggcatgaagctgggcgggacgccgctggtcgagtatacgcgggacaggctgcaccgtgagacggtgcgcagcttcggcagcagggcaggcagtaatgccgcatatgaactgaccagcacatacacccccgcaggccagttacagagccagcacctgaacagcctggtgtatgaccgtgactacgggtggaatgacaacggcgacctggtgcgcatcagcggtccgcgacagacgcgggaatacggctacagcgccacgggcaggctggagagcgtgcgcaccctcgcaccggacctggacatccgcatcccgtatgccaccgacccggcgggaaaccgcctgccggacccggagctacacccggacagcacgctcacggcgtggccggataaccgcatcgcagaggatgcgcactatgtctaccgctacgatgaatacggcaggctggcggagaagacggaccgcatcccggaaggggtgatacggatgcacgacgagcggacccaccactaccactacgacagccagcaccgtctggtgttctacacgcggatacagcacggtgagccgcaggtggagagccgctacctctatgacccgctgggccgccggacgggaaaacgggtgtggcggcgggagcgtgacctgacggggtggatgtcgctgtcgcgtaaaccggaggagacctggtacgggtgggacggtgacaggctgaccactgtacagacccaacagacaagaatccagacggtataccagccgggaagcttcacgccgctcctgagaatcgaaacagagaatggtgaacaggcgaaggcgcggcaccgtagcctggcggaggtgttgcaggaggacacgggtgtgacgctaccggcggagctggcggtgatgctggggaggctggagcgggaactgcggcagggcagcgtgagtgaagaaagccagcagtggcttgcgcagtgcgggctgacggcggaacagatggccgcgcaactggaggcggaatacatcccggagaggaaacttcatctttaccactgtgaccaccgtgggctgccgctggcgcttatcagcccggaaggggaaacggcgtggcagggggagtatgacgagtggggaaacctgctgggcgaggaaagcgcgcagcaccttcagcagtcactccgtctgccgggacagcagtatgatgaggagtcggggctgtactacaaccgcaaccggtactatgatccgttgcaggggagatatatcacccaggacccgatagggctgagaggtgaatggaatctgtataaatatccattaaaccctgttcggtttatagattctttgggtttaaaattccatgttaacggtgatccaagtgattttaatcaggctgttgagtatttaaaacaagattcacaaatgaaagaaactatagattttttatcaagctctgaagaaactataaatatagagtatattgaaggaatcaatgttagatttaattcgaataatatggcgatatattggaatagtagagcatctttattttgttcaactgaattaaactcgaaatcacaatcgcctgcattaggtttgggacatgagtttgctcatgcgcagtattaccttcttgataaggaaaatttcatggctcttttaagccgaacagataagaaatatgagaataaagaagaggcaagggttattacaataattgaatcgcgtgcggcgaaaactttaggtgagtgtaccagaggagctcatagtggactgcctttttatcgggtggatggaccgttgcagacgatgaaaataacgggtacgccagaatagtgaggttttttatgatgaaatatttgatggttttattgtctctattttctggttcggtactggggatggggcgagtgaatgaattgtgtggaatagatagcgtgaaaacgatagagataattaatcttccatcgtatgttaccacgttagttccgcttagcaaggaaggtcttaatgaaatatacagatataaagtggtggtgaatgaaattagcgatctttatgctggtaagataattgatttattgcaaatgaagtatttcagaaaagaaaaatataacaatataagatgggggttagtatcatttcgaaaggtaataataaatgtgaaatttattttgatgcttttggtgaatgtggaagtgtgaatggcattaacgtgtgttttgaaaaaaatgaaatgataggttggattaaaaaagaaatccctttgctgtcgcaaaaaataggtgggctttaaatggtagggcaatattcaaagacagtataggtaactatttgtatggccatgtaaggtaaaagaaaaggaataaaccatgagcggaaaaccggcggcgcggcagggcgacatgacccgcagggaaagatcatcagaagttcactttttgtactaaataattcgcattttatgtttaaaaattgagatattcctcattacctgaagctgttttttattgcttatacatgatcaaatactccttacataaataaggtgaacaaatggaacttaaaaaattgatggaatatatttctattattcccgattacagataagcctggaaagtagagcataaattgtcaggcatcctactattgactatttttgccgttatttctggtgcagaaagttgggaagatatagaggatttcggggaaacacatctcgatttcttgaagcaatatggtgattttgaaaatggtattcctgttcacgatactattgccagagttgtatcctgtatcagccctacaaaatttcatgagtgctttattaactggatgcgtgattgtcattcttcagatgataaagacgtcattgcaattgatggaaaaacgctccggcattcttatgataagagtcgccgcaggggagcgattcatgtcattagtgcgttctcaacaatgcacagtctggtcatcggacagatcaagacggatgataaatctaatgagattacagctatcccagaacttcttaacatgctggatattaaaggaaaaatcatcacaactgatgcgatgggttgccagaaagatatagcagagaagatacaaaaacagggaggtgattatttattcgcggtgaaaggaaaccaggggtggctaaataaagcctttgaggaaaaatttccgctgaaagaattaaataatccagagcatgacagttacgcaatttgtgaaaagagtcacggcagagaagaaatccgtattcatattgtttgcgatgtccctgatgaacttattgatttcacgtttgaatggaaaggactgaaaattcacaatgtgtgttaattttactgacatctttcaaaaggagcacaatcatgccgcacatcgacattaaatgctttccgcgtgaactggacgaacaacaaaaagcagcacttgctgcagatattaccgacgttattattcgccatctgaacagtaaagatagctcgataagcattgctctacagcagattcaaccagaatcttggcaagctatctgggatgccgaaatcgcgccccaaatggaggctttgataaagaaacccggttacagcatgtaatgcttaacccgccgtaactcgcttgccgctggtaacaaacgtgccagcacctaaatgatgcaacgtattgagcttatcatcatcaaactgccagcggccttcgacaaatacccgtgcgtctgccgctgctgataccacctcgccaaacagcgtgtcgtatttttgttgcgcagaagtcgcaggtagcaggcggcactccatccacgccaggcatttctcttcaacaagtggcaaaccaagcaccggacctttcaccaccggaatgccatagcaattaaatttatcttcttcacgacccgacacgcttcccactgcccacgtccagttagttgctgcaacgcccgggataacgatgccaaacttaccgttacgttcaatcaactccctggtccatgtcgatttatctaccacaatcgccacgcgtggcggttcaaactccaccggcattgaccaggctgcagccataatgttacgccgctgggattgctcatcgaaactggtgatcatgacagttgggccatgatttaatagacggctggcatggtgtaattctatggggatgaatcggctcatggtatcgcctcgtgaagaaggtttttttaagcgtagtccgtaacgcaataagtaacgaaattaacgggattggcgatttgcaaacgtgatgcatgtccgcgatcgcacaaaatagccggtgcggcgtctattccaggttataagttgagaaaaccactaagggaaacgcctgatgacgcccattctgaatcactattttgcccgtattaactggtcgggagctgctgcggtcaatattgatacgcttcgtgcattgcacctgaaacacaattgcaccattccgtttgaaaaccttgacgttttgctgccgagggaaatacagcttgatgatcaatcgctggaagagaaactggtgatagcccgtcgtggcggttactgttttgagcagaatggcgtgtttgagcgggtgttacgcgagctggggtttaacgttcgcagcttgttagggcgcgtagtgttatcaaatccgccagcattaccgccgcgcacccatcgtttgctgttggtggaactggaagaggaaaaatggattgctgatgtcggtttcggtgggcagacgctaaccgcgccgattcgtttagtttccgatctcgtgcagaccacgccacacggagagtatcggttgttgcaggagggtgatgattgggtgttgcagtttaatcatcatcagcattggcagtcgatgtaccgttttgatctctgcgagcagcaacaaagcgattatgtgatgggcaatttctggtcggcgcactggccgcagtcgcattttcgccatcatttgctgatgtgccgccatttgccggacggtggcaagctaacgctgaccaattttcattttacccattatgaaaatgggcacgcggtggagcagcgaaatctaccggatgtggtgtcgttatatgccgtgatgcaggaacagtttggtctgggcgtggatgatgcgaaacatggctttactgtggatgagttagcgctggtgatggcggcgtttgatacgcatccggaggcgggaaaataatttatgtcaggttgccggatgcggcgtaatcgccttatccggcatacattagcccggttgtagacctgacaggcgaagcgcatcaggcaacgatttcagatttcaattgcccattcggcatgaaacaaaatcaccgctgtgcctgaaatggtgactttttccggttggttatcacgaattgtcaccgtcacttcaatcacgccgtcacgccccaatgcgcgcccctgatggcctttaacacgcagcaccttgccatcgtggggcaatacgttgtgatgtaccaaccatgcacccatcgggccattggcattgccagtcaccggatcttccacaataccaatcgcaggcgagaacatgcgaccatcggtttcgtttttgcctgggcggatctggaacgggaagaaaccattgcagccaatctgtttgctgatagcgctcagcgcagcaagatcaggcgaaagggcgtcgatatccacttctggtttcaacgggatcatcacttttgagtgtcctgttgttgccacctgaattggcaagcctggcagaatatcgtcctcagtgagatgaagcgcgttgataatcgcctcacgtgtttcaccctccagcggcggttcaaagcccggcgtaccttgttccagcgaaatacgataatcatcgttgtgcttttcgatagtcacgcgatgttttcctgccagcgatgtttgccagatcgtgcaatttcctaaacctaacaccttcgcacgtacatagtgcgcagctactgtcgcgtgaccgcaaatcggcacttcaaccgttggcgtaaagtagcggatgcgcacatcgctgtcgtcgctgtgcagcagaaaagcagtttccgaatggcctaactcgcgggcgataagctgcatttgcgcttcgctaagattatcggcggggaaaacaacaccggcagaattgccgcgaaatggttgagaggtaaaagcatcgacgtggtacacctgcggtttcattaacgttctcctgtgactggagaactatcatagcctgcaagtggccggagagcgaagggctatccggccagggtgaaattatcgccgcgaacgcacaatctgataccgacgagtaaagtactcaaacggcgcgctccacacatgcaccaatctggtgaacgggaagagcaggaagatggtcattcccaataccagatgcaggcggaaaacgaacgctacgccgttaagcatttctgacgatccaccacggaaagtgacaatgctttgcgcccaacccaccagcttcatcatttcgctaccatcaggatactgtgctgaaaacggtatggtacttagccccagcagacactggatcagcaaaatgctcatgatgataatatccggcgtagtggaagttgcacgcacgcgctgatttgtcagcctgcgccacagcagtcctgcgccgccaatcaatgtcaacacactgcaaataccgccgagcaccatcgccatgagttgtttcgctgccactggcaaaaaccacgcgtacatccagtgcggcgttaacatgccgaacaagtgcccgaagaaaatccccaaaatgccgatatggaacagattcgaccatatcaccatcccgcgtttatcgagcatttgacttgaggaggcgcgccaggtgtactgcccgtagtcgtagcgcagccagctgccgaggaaaaacaccgtcgcacaaatgtacgggtagatatcgtaaaaaaagacgttcagatactgaatcatttcccacctcccgcactgatgtcgacatattgcggcgcgacatcctggctaaagcgtcgctgatattgattaagcggcgagctgtcacacgccgtggcgttatcttcaataaacttcacctgttcctcttcccacactgcatcaagcgcctggcgggtgtcatcgcgctcttcgctgtttacttgttttgtgacactgtcacttgaaagggagcttcccgccagttgcagcagagcatcaaacaacgcgtaccacggtgcctcgcgttgttttaagcgaccgccaagcagggcgaggatcggcgcaacattgagcaatccttctttcgcctgatcgtcaggcagtacgcttaaatactccagatacagcggtagataatcgggcagttcccgacaatccagctgcaggccgaccttttcatactccgccagcaggtccaccattgcctggccgcgatcgcgggactcggcatgaacatgttcgaacagcagcagcgatgtggtacgtccacggtcaaacacttcgcaccattcggcctgtttatccagcagcggcgcgttaagcaggttgtgggtgaaatccgtaagcatcggcgcgtcgctgcggatcaacgccagcgcgtcctccttgcattcccacaacagctcgtccggatactccatcaacaggccgatcactttgaggatctgcattattcgccctccgctttgtcgcgcacttcggtgatgttgatggcatcgatacggctactgttgaacaggttgaatttactgtccgaaccgtggcaaccgtcgtcaaaggtaaaaccgcagccgttgcgttctgcgaaggcatcgcccgccatttcccgatggctcgtcgggatgacaaaacgatcttcatagttggcaatggcgaggtaacgatacatctcttcgacctgggcgacgctcaggcctacttcgtcgatggcacgagtatcagtaacgccttccacggtttgtgaacgcatatagtggcgcatcgccatcatccgtttcagcgcccgcagtaccggaccggtatcgccggcactcaacatattggcgagatattgcaccggaatacgcaggctttcgatggcgggcagcacgccttcgcttttcggcaaaccgcccgcatctgcgtaggactgaatcggcgacagcggaggaacgtaccagaccattggcagggtgcgatattcagggtgcagcggtagcgccagtttccagtccatcgccattttgtagacaggcgaacgctgggcagcttcaatcacgttttgtggaataccttgtttcagggcttcctcgatcactgagggatcgtgtggatcgaggaatacttcgcactgacgttcatagaggtcaacttcgcgctcggtgctcgccgcttcctcaatgcggtcggcgtcgtaaagcagcacgcccagataccggatgcgacccacgcaggtttctgagcacacggtgggttggcctgactcaattcgcggataacagaagatacatttttctgacttgccgcttttccagttgaagtagatttttttgtacggacaaccgctaatgcacaaacgccagccacggcatttatcctgatcaatcagcacaatgccgtcttcttcgcgtttgtagatagcgccgcttgggcaggtcgccacgcaactgggattgaggcagtgttcgcacaggcgcggcaggtacatcatgaaggtgttttcaaactgcccgtacatctccttttgcatggcctcgaagttgcggtcgcgggcacgtttttcaaactcgccgcccagcagttcttcccagtttgggccccagatcactttgtccatccgtttgccgtcaatcagtgaacgcgggcgagcagtagggatatgtttgccttccggtgcgctatgcaaatgttcgtagtcgaaggtgaaaggttcgtagtaatcatcaatctgcggcaccaccgggttggcgaagattttggttattacgcccatcttgctgcccagacgcggacggatcttgccattcacatcgcggacccagccgccttgccactcttcctgatcttcccagtttttcggataaccaatgcccggtttggtttcgacgttgttaaaccatgcgtactccatgccttcgcgcccggtccagacgtttttacaggtcaccgaacaggtatggcagccgatacatttgtcgaggttaagcaccatgccgacttgtgaacggattttcattttttcgcctcctgtacctgatcgcgaccttcatcatccagccagttaacgttcttcatcttgcggatcatgatgaactcatcgcggttcgatccgacggtgccgtagtagttaaagccccaggccagctgcgcgtaaccgccaatcatatgcgttggtttcgggcaaacgcgggtgaccgagttatgaatgccgccgcgcatgccagttacttccgaaccaggaatattcataatgcgttcctgggcgtgatacatcatggtcatgcccggcggtacacgttggctgaccaccgcgcgggcagtcagcgcgccgttggcgttgaatacttccacccagtcgttatcgacaatggtcagttctcgggcatctgtttcgctgatccagacaatcggtccaccgcgagagagcgtcagcattagcaggttttcactgtaggttgagtgaatgccccatttctggtgcggcgtcaggaagttaagtgctttttccgggaagccgtttggcggtatctggcgcatctcactgacgctacgggtgtcgataggcgggcgataagccaccaggctttcaccaaaagcacgcatccacggatgatcctgatagagctgctggcgtcccgacagcgtgcgccacggaattaactcatgaacgttggtgtatcccgcgttataggatacgtgatcgctttccagaccggaccaggtggggctggagataattttacgcggctgcgcctgaatatcgcgaaagcgaatcttctcgtcctctttgtgcagcgccagatgggtatgttcgcgcccggtgatctcgcccagcgcctgccacgctttgactgcaacatgaccgttggtttccggtgccagtgccagaatcacttctgaagcgtcaatggcggtgtcaatcagcggacgcccctgtgccgggccatcacgcttggtgtaattgagtttgccgaggaaatcgatttcatcctgcgtattccacgaaatccctttaccgccattgccaagtttgtccatcaatggcccgagcgaggtaaagcgttcatacgtagcagggtagtcgcgctccaccgccacaatattcggcgcggttttgcctggaatcagatcgcattcgcctttgcgccagtcgagcacttcacacggctgtgagagctctgccggagagtcatgcagtaggggttgtaataccacgtcggtttctttgccaagatgacccacgcacacttgcgaaaatgctttggcgatacctttgtagatttcccagtcgctgcgtgattcccacgccggatcgaccgccgcagaaagcggatgaataaacggatgcatatccgaggtgttcatatcgtctttttcgtaccaggtggcggtgggcagaacgatatcggagaacaggcaggtactggacatgcggaagtcgagcgtcaccagcaggtcgagcttgccttcaatcgccgcagtttgccactcgacttcttccggtttgatcccgtcgctggcaccgagttcctcgccctgaatcccgctttcggtccccagcagatacttctgcatatactcgtggcctttgccggaggagccaagcaggttagagcgccagacaaacaaattacgcggatgattgctgccgctatctggttgttcgcaggccatacgtaaatcgcccgatttcagcgcctgggcggtaaattctgtgggggataatccggccttgtcggcttcagctttaatcccgagcgggttacgccccagctgcggcgcagaaggtagccagcccatacgttcggcgcgaacgttgaaatcaatcagatgaccgctgtacttactggcatcggcgagcggtgaaagtaactcctgagcagagactttttcatagcgccattggctggaatgattgtagaaaaacgaggtgctgttcatttggcgcggtggtcggttccagtcgagcgcaaaggccagtggcaaccagccggtttgtgggcgcagtttttcctggccgacatagtgtgcccagccgccaccgctttgcccgacacaaccgcagaagatcagcatattgatcatcccgcggtagttcatgtccatgtgataccagtggttaacacctgcgccgaggataatcatcgagcgcccatgcgttttatgggcggtatcggcaaattcacgggcgatggtttcaatatactggcgcggcacgccggtaatttgctcaccccaggctggggtgtacggtttgatttcagcgtaatctttcgcactgttttcatcttccagcccgcgatcgaggccgtaattcgccagtaccaaatcataaacgctgaccaccggacaggtgttgccatcgactaacgtcaggtttttaacgggcaattggcgcaccagcaccggattgtgttttacgctgcgaaaatgcggattttcaatgccgccaaagtaggggaaggccacgcctgcaacagcgtcatgttgaccgagcagggttaacgacaattcggtttccgtaccggcggcaatggattccagattccatttgcctttttctccccagcggaaaccaatcgaaccgttcggcactaccaattcacctgcggtattaactgctacggttttccactgcggattgttgctttcgcccagtccatccaccaggtcagatgcgcggatcatgcgcccgggaacgtagctaccatcgtcgcgaggctccagcattaccagcatcggcatgtcgctgtagcggcggcagtagttgataaagtagtcgctgggattatcgagatgaaactcttttaaaatcacatggcccattgccatcgccagggcgctgtcagtgccttgtttcggtgccagccactggtcgcacaatttggccacttcagagtagtcaggggtaatggcgatggttttagtgcctttgtagcgtacttcggtaaagaagtgggcgtccggcgtacgtgtctgcggtacgttagacccccaggcgatgatgtagctggagttataccagtcggcagattccggtacgtcggtttgctcgccccaggtcatcggcgaggcgggcggcaggtcgcaataccagtcgtagaaacttaaacaggtgccgccaagcagtgacagataacgcgttccggcggcgtaagaaaccatcgacatcgccgggatcggcgagaaaccggcaacgcgatccgggccgtaggttttgatggtccagacgttagcggcggcaatcagctggtttagttcctgccagttggagcggataaacccgccgcgcccacgcacttgtttgtagctcaggcacttttgcggatcgttcataatcgatgcccacgccagtaccggatcgctgtgttgtttgagggcttcgcgccacagttcaatcagtcgtttacgaatgagcgggtatttcaggcggttagcgctgtaaagataccaggagtaacttgcgccacgcgggcagccgcgaggttcatgattgggcaggtcagggcgagtgcgcgggtagtcggtctgttggatttcccaggtcaccagaccatttttaacgtagattttccagctacaggagcctgtacagttaacaccgtgggtggaacgcacgattttgtcgaactgccaacgctggcgatagctgtcctcccagtcgcggttgctatgcatcacctgtccgtgaccatcggcaaaggtttcgcccttttgtttgaagtagcgaaagcgatccaaaagtttactcatgacatgactcctgctccaggaatgaattgggatctgatgccttgtcggatgcgacacggttgtacatcaggcatcgatctcttatttttggctgaacttccgccgaccataaaccagccaggtcagcagcacacaaacgatgtagaagattaaaaacactttcatcgcgccgaccggagagccggtcatattgagcgacatgccaaacgcctgcggaataaaaaagccgcccactgcgccaatggctgagataaagcccagagccgccgccgtttcggtgacggcttctttctgagcttgctcatcactaccgcctttcatctttacccgataaatggttatctggcgaaagatgacggcgatcatctggaaagtagaaccacttcccagacccgcagtcagaaacagccccataaatacggcgtaaaaggcgatgaaattaccggagcctgtgcccggtaaggtaaggaacagcagggcactgaaaatcgccataaaaataaagttgatcaacgtcacccgcacgccgccgaacttatcggaaatagcaccaccaaccgaccgcgcgatggcaccgataaatgggccaaagaacgccaggcgcagaatattcacatccgggaactgggtttttgccagcatggcaaaacccgcagaaaaaccgataaacgaaccgaaggtggcaaggtaaagcaggctcagcagccagagatgcaggcgttgtaagacagggagctggtcggcaattgaggcgcgtgaactggcgatatcattcatccctgaccaggcggcgatcgtggcaatcgccagtagcggtacccaaatccatgcggcattcgccagcgacatcaccgaaccgtcggcctgcggtacgccattgacgccgagaaaggcaaatacaggtacaaaaatgaccagcggtgcaaccagctgcattacacttacacctaagtttcctaatccgccattaatcccaagagcgctcccttgtttggcttttggaaagaagaaacttatattgcccatgctcgaagcaaagtttgcacctgcaaaaccgcatagcaaagcgataacgataaatatcccaaaaggagtattcggattttgcacggcaattccgagccagacgcaaggaataatcaggattgcagtactaaaaaccgtccatcggcgtccaccgaatataggcaccataaaggagtagggaacacgcaataatgcgccagaaacggagggtaatgcggttaataaaaagagttgatcggtagtaaaattaaaaccgattttattgagattaacggtaactgcgctaaatagcatccagacacagaaggcaagaagtagacaactgactgatatccagaggtttcttcgagcaatatgttttcctttattttcccagaaggccggattttctggtttccagtcgcgtaaaagataacgactatttttctcattttgcagtgccatattgttcctcacatgcacacattggtaatgaaaaaagacaaaacaggaggtaaggcgcaatagccagttattagaattaaggatgaattgggtgaagtgctgattgaaagaatagataagaaagcgtaaccgcgggggcagaatggggattaagtagccagatatgtgttactaaatgtaactaacaagctaaccttcaaacgggggttaatctttgaacgtatgtcatgtttcaacccttcagatcgtgaatctaaagggttacatattaactatattatcaacaagaccagacacttatagaattagtgatgatttattcactaaaaaggccatgaactggaggaaaacgatctgtccagaaggtctatcggttcctctcttattgcctgattgtaataatcgttattacagtaagtattgtttatttcatctaaggtcatgtttttaacttttatattcctctggtttacaacttcctctgtcttgtaagtgtgtatattatatggggtatatgcttttttaataggatagtgaaacaattcgttatccacatctattccgtcagagtgaacttcaaatgcaccaggcgaaagaattgccaggccagtattaagcttaagtgctggggaaaacaaattaaataacatgagctgcatagtagggcaattgttcttcccagaaacatttaaaaaatttaagtttttgctctgttttattatggggaataaagttccaatatcggatgtattattagtatcaatgtgggttattttattattgtccagtcttaaacttttgatagatggaagataagtcaggaaatcaagatttatatatttcaactggttgttagcagcgtttaatgtctgaacattgcagaagttgctatagaatattttaatttcagaaagcaaattgttgttaataagtaacgtattcaagttgggaaataagtcattgtgtaaacttgttagtttattatgggatagatccagcagtaagagttcatttttattacctgcaacaatatcagttaattgattatggctgagattcaggtattgcagccattcgcaagattctaattgcacaaactctagttgattatgtgccgcactaaaataagtaactgatgaaagcctatctatatcaatatttctgagagcattattattcatagatatatgtgtaatacttacatttctgccttgaggaaaatttattgagtcaagagtattactattcagacttagctttacgagtctatcgtagttggttgcatcaaaatgtgtgagttggttattatcaagattgatagaggtgaagttttgcagccctggtggttgagtggttaaattaagtcctgataaatcaatggtcacttcattagtgtcatcaattatatttcttactgcagtccagtactgcatttgtgcaagtggatcattgttgatgccgttaactaatacatgccaaagatgttttgatgatattagttgatcaatgtcattggttggcagtaaattgttattgcttaagtttaaatattccagttttgtagtgtttttggcgtttaaatgtgcaatatggttgtcgtttaaagtgattgttttcatcctgggatgattgtgtaatataaggtcagtgatcatattgtgatgggcacttaactcaatcagagattcttgccgcgcgagccgttggcttcatcgttatagcctttaaaatcatattcccagtgaccaaaaccaatcatttgatcattgatttgcgtttctcctttaaagccgagacgggcataagttttatcaccatcgtcacgcttatcatcagtaaaataacgtagagcggtaaccttgccataaaggtcgagtttattaccatccttgttatagacttcggcagcgtgtgctacgttcgcagctaacaaaccagttacaaccaccgcaactatttttaatttcatttaacagaatccttttaattatcgttaaacgtattttctaaacgaattttaaacggcgtcatttataaatgacatactgtttttaaaatagaatggtgattaaaaacaatgagaaaaatagatgaaataatattatttatcgatatgtgatcgaagtcgaaatgagatataaggtgaattactggtatttgaaatttattttttaatattgtcggaatttatctgattaactgccgggccgtagacccggcaattattttaaccacgacgtgtcgccagccagcagagcagggaaccgccgcagaccattagcgcgccttgccagaacgagaacgacagtggggcgctgagcagcacggctgcaagcgctgaggaaagtacaggtgtaaaatacgagcctaccgccattatggtgacattgccatgcaatataccgacattccatgcagcataagcaaatcctaaggtaaatgccgcagagatgagtttaatcatgacgggcgtgctaaataccatttctggttgtggcgtgagaaaatagtaaacccacagacttgctcccgttagcaggacaaaaacggtaattccgttaaatccgcgtgcgtatttattcgttactgtgcaataggctgcccagataaacgcaccaataaacgccaggaaataactcaatgggctggtggtaatattattgatgatttcatcataatgtaacccattatcaccgcctaacacccagcagacgccgaccagggctaataataatcctggtacaatcagccagttggttttctgaccattaaacagaatggcaaagagaattgtcaggctgggccatagatagttcaccatacccacttcaatcgcctgatgacgggtcgccgcataccctaaggaaagcgccagacagatttcatagctgacgaataacagactcccggcgagtaaatagcctttcggaatctgccgaatacgcggaaatccaaccgtgaagattaacagcagcccgcttaatgaatagatagcagctgcgccgccgaccgggccgagcccctcgctgacaccgcgaatcaatcctaccatcgtgctccacaggacgatcgctattagccctatgagcgttgctttttgtcgtgtcatgctcgctgttttgtctctcttgccgttaaaaattaagctgaattttatagcatttttttaactggcctgtcaggcagtggtgcgtttttctaccgctattgaggtaggtcaatttgcgcaggcggattattttgtggcaaacacgtgttctttttgatttcgcgcaaaaagattcagaattttactgttagtttcctcgcgcagtaatacccctgaaaaagaggaaagcaatggacgtcagtcgcagacaattttttaaaatctgcgcgggcggtatggctggaacaacggtagcggcattgggctttgccccgaagcaagcactggctcaggcgcgaaactacaaattattacgcgctaaagagatccgtaacacctgcacatactgttccgtaggttgcgggctattgatgtatagcctgggtgatggcgcgaaaaacgccagagaagcgatttatcacattgaaggtgacccggatcatccggtaagccgtggtgcgctgtgcccaaaaggggccggtttgctggattacgtcaacagcgaaaaccgtctgcgctacccggaatatcgtgcgccaggttctgacaaatggcagcgcattagctgggaagaagcattctcccgtattgcaaagctgatgaaagctgaccgtgacgctaactttattgaaaagaacgagcagggcgtaacggtaaaccgttggctttctaccggtatgctgtgtgcctccggtgccagcaacgaaaccgggatgctgacacagaaatttgcccgctcctcgggatgctggcggtagacaaccaggcgcgcgtctgacacggaccaacggtagcaagtcttgctccaacatttggtcgcggtgcgatgaccaaccactgggtggatatcaaaaacgctaacgtcgtaatggtaatgggcggtaacgctgctgaagcgcatcccgtcggtttccgctgggcgatggaagcgaaaaacaacaacgatgcaaccttgatcgttgtcgatcctcgttttacgcgtaccgcttctgtggcggatatttacgcacctattcgttccggtacggacattacgttcctgtctggcgttttgcgctacctgatcgaaaacgacaaaatcaacgccgaatacgttaagcattacaccaacgccagcctgctggtgcgtgatgattttgctttcgaagacggtctgttcagcggctacgacgctgaaaaacggcaatacgataaatcgtcctggaactatcagttcgatgaaaacggctatgcgaaacgcgatgaaacactgactcatccgcgctgtgtgtggaacctgctgaaagcgcacgtttcccgctacacgccggacgttgttgaaaacatctgtggtacgccaaaagccgacttcctgaaagtgtgtgaagtgctggcctccaccagcgcaccggatcgcacaaccaccttcctgtacgcgctgggctggacgcagcacactgtgggtgcgcagaacatccgtactatggcgatgatccagttgctgctcggtaacatgggtatggccggtggcggcgtgaacgcattgcgtggtcactccaacattcagggcttgactgacttaggcctgctctctaccagcctgccaggttatctgacgctgccgtcagaaaaacaggttgatttgcagtcgtatctggaagcgaacacgccgaaagcgacgctagctgatcaggtgaactactggagcaactatccgaagttcttcgttagcctgatgaaatctttctatggcgatgccgcgcagaaagagaacaactggggctatgactggctgccgaagtgggaccagacctacgacgtcatcaagtatttcaacatgatggatgaaggcaaagtcaccggttatttctgccagggctttaacccggttgcgtccttcccggacaaaaacaaagtggtgagctgcctgagcaagctgaagtacatggtggttatcgatccgctggtgactgaaacctctaccttctggcagaaccacggcgagtcgaacgatgtcgatccggcgtctattcagactgaagtattccgtctgccttcgacctgctttgctgaagaggatggttctatcgctaactccggtcgctggttgcagtggcactggaaaggtcaggacgcgccgggcgaagcgcgtaacgacggcgaaattctggcgggtatctaccatcatctgcgcgagttgtaccaggccgaaggtggtaaaggcgtagaaccgctgatgaagatgagctggaactacaagcagccgcacgaaccgcaatctgacgaagtggcaaaagagaacaacggctatgcgctggaagatctctatgacgcagatggcgtgctgattgcgaagaaaggtcagttgctgagtagctttgcgcatctgcgtgatgacggtacaaccgcatcttcttgctggatctacaccggtagctggacagagcagggcaaccagatggctaaccgcgataactccgacccgtccggtctggggaatacgctgggatgggcctgggcgtggccgctcaaccgtcgcgtgctgtacaaccgtgcttcggcggatatcaacggtaaaccgtgggatccgaaacggatgctgatccagtggaacggcagcaagtggacgggtaacgatattccggacttcggcaatgccgcaccgggtacgccaaccgggccgtttatcatgcagccggaagggatgggacgcctgtttgccatcaacaaaatggcggaaggtccgttcccggaacactacgagccaattgaaacgccgctgggcactaacccgctgcatccgaacgtggtgtctaacccggttgttcgtctgtatgaacaagacgcgctgcggatgggtaaaaaagagcagttcccgtatgtgggtacgacctatcgtctgaccgagcacttccacacctggaccaagcacgcattgctcaacgcaattgctcagccggaacagtttgtggaaatcagcgaaacgctggcggcggcgaaaggcattaataatggcgatcgtgtcactgtctcaagcaagcgtggctttatccgcgcggtggctgtggtaacgcgtcgtctgaaaccactgaatgtaaatggtcagcaggttgaaacggtgggtattccaatccactggggctttgagggtgtcgcgcgtaaaggttatatcgctaacactctgacgccgaatgtcggtgatgcaaactcgcaaacgccggaatataaagcgttcttagtcaacatcgagaaggcgtaagggggcgaacagatggctatggaaacgcaggacattatcaaaaggtccgcaactaactccatcacgccgccttctcaggtgcgtgattacaaagcagaagtcgcaaaacttatcgacgtttccacctgtatcggctgtaaagcctgtcaggtggcgtgttcggagtggaacgacatccgtgatgaagtggggcactgcgtcggggtttacgataaccccgccgatctgagcgccaagtcctggacggtgatgcgctttagcgaaaccgaacagaacggcaagctggagtggctgatccgtaaagacggctgtatgcactgtgaagatcccggctgcctgaaggcgtgcccgtctgctggtgcaatcattcagtacgctaacgggattgtcgatttccagtcggaaaactgcatcggctgtggttactgcattgccgggtgtccgtttaatattccgcgcctcaacaaagaggataaccgggtatataaatgcacgctctgcgtcgatcgcgtcagcgtcggccaggaaccggcttgtgtgaaaacctgtccgaccggggctatccacttcggcaccaagaaggagatgctggagctggcggaacagcgcgtggcgaaactgaaagcgcgtggttacgaacatgctggcgtctacaacccggaaggggtcggtggtacgcacgttatgtacgtgctgcatcacgccgatcagccggagctgtatcacggtctgccgaaagatccgaagatcgacacctcggtaagcctgtggaaaggcgcgttgaaaccgctggcagcggctggctttattgccacttttgccgggttgattttccactacatcggtattggcccgaataaggaagtggacgatgacgaggaggatcatcatgagtaagtcgaaaatgattgtgcgcaccaaatttattgatcgcgcctgtcactggaccgtggtgatttgcttcttcctggtggcgctgtccgggatttcgttcttcttcccgacgctgcaatggctgacgcaaaccttcggtacgccgcagatgggacgcattttgcacccgtttttcggcattgcgattttcgtcgcactgatgtttatgtttgtgcgttttgtgcatcacaacatcccggataagaaagatattccgtggctgttgaacattgtcgaagtattgaaaggcaatgagcataaagtggcggatgtcggtaagtacaacgccgggcaaaagatgatgttctggtcgatcatgagcatgattttcgtgctgctggtgaccggggtgattatctggcgtccgtactttgcgcagtacttcccgatgcaggttgttcgctacagcctgctgatccacgcggctgcgggtatcatcctgatccacgccatcctgatccatatgtatatggcattctgggtgaaagggtcgattaaagggatgatcgaagggaaggtgagccgtcgctgggcgaagaaacaccatccgcgctggtatcgtgaaatcgagaaggcagaagcgaaaaaagagagtgaagaagggatataatctcttttgaactttaagctgaaaatggcgctttaagaagcgccatttttttattgcgtaaccagacggcgtagtcgcgacacatccaccgttttttctgcctctgccagactccaggcgttttgcagattcagccacatttgcggcgaactgccgatcaccacggaaagtttaatcgccatttctggtgtcaaagctgcttttccggtcagcaatcggcttgccgttgagggagcaatttccattgctctggcaaactcgcgcaggctgacattaagttcgtccagtgattcctgaataatgtcccccgggcggggatgattggccattttcatcagtgtctttactctcagtagtgttccttcatcaggaacactatcattattgttgcgtaggaaggaacaataatccatttagccatttaatgtcggagagagtgcgatgctgcgacaccaggactggcactcgcagcaaaggcctcttaacggcggaaatcaatcaccatacggccacggattttgccttcttccatctcggtaaagatggtgttgatgtccgctaacggacgcagggcgactttcggcaccactttgccttcggcggcaaactggaaggcttcggttagatcctggcgcgtgccgaccagcgaaccgaccacttcaatgccatccagcacaaggcgtgggatatccaggctcatagactccggcggcagaccgacagccacaacacgaccgcctgcacggacagcatcaactgccgagttaaacgcagctttagcaactgctgttaccaccgcagcgtgagcgccaccggttttctcctgcacaattttggcggcgtcttcggtgcgtgagttaatcgctaaatctgcacccatttcggttgccagttttaactgctcatcattgacatcaatggcgatcactttcgcgttaaagacattcttcgcgtattgcagagcgaggttacccagaccgccaagaccgtagatagcaatccactgccctggacgaatttttgacagtttaacggctttgtaggtggtgacccccgcacaggtaatgctgctggccgccgccgagtccagaccatctggcacttttaccgcgtaatcggcgaccacgatgcactcttccgccatcccgccatcaacgctgtatccggcatttttaactgaacggcagagcgtttcgttaccactattacagtattcgcaatgaccgcatccttcgtagaaccacgccacgctggcacgatcgcctggttttaatgaggtgacaccagggccaacttctgccaccacaccgatgccttcatggcccagaattacgccagttttgtcaccaaaatcgccattcttaacatgaagatcggtatgacatacaccacaacactccattttcagcagggcttcgccatgtttcagtgagcgcagtgttttatccgtaacgtcaacgtgatgatccttcgtaacaactgcagccttcatagttcctccttttcggatgatgttctgcatagcaggtgaggcaaatgagatttattcgccactacccagtatggatgagatctgaaaaagggagagagaaatagcccggtagccttcactaccgggcgcaggcttagatggaggtacggcggtagtcgcggtattcggcttgccagaaattatcatcaatggcctgttgcagagcttcggcagacgttttcaccgccacgccttgctgctgcgccattttgccaaccgcaaacgcaattgcgcgggagactttctgaatatctttcagttccggtagtaccagaccttcgccgttcaggaccagcggcgaatactgagcaagcgtttcacttgccgacatcagcatctcatcggtgatacgtgacgcgccggaagcaataacccccaggccgatgcccgggaaaataaaggcgttgttacactgggcgatagggtagattttatctttccataccactggattaaacgggctgccagtggcgaccagcgcgttaccttcggtccaggcgataatgtcctgcggtgtggcttccacgcgtgacgtcgggttagacagcggcatcacgatcggacgcggacagtgtttatgcatctcacgaatgatctcttccgtaaacagcccggtctgtcctgagacgccaatcagaatatctggttttacattgcgcaccacatccagcagtgacaacacatcgctgtcggtatcccagtcactgaggttttcgcgcttctgcaccagtttggtctggaaaggcagcaggttcggcatcttgtcggtcagcaagccaaagcgatcgaccataaagactttctgccgcgccgcttcctcgcttaatccttcgcgctgggtctgggagatgatcatttcggcaatgccgcatcccgctgaacctgcgccaaggaagacgatttttttctcgcttaactgaccacctgccgcgcggctggctgcgatcagtgtgccgactgttaccgccgcagtgccctgaatgtcatcgttaaaagaacaaatttcattgcgatagcggttaagtaacggcatcgcattttttgagcaaagtcttcaaactgcaacagcacgtccggccagcgttgtttcacagcctggataaattcatcaacgaattcatagtattcatcgtcagtgatacgtggattacgccagcccatatacagcggatcgttaagcagctgctggttgttggtcccaacatccagcaccaccggaagggtatacgccgggctgatgccgccacaggcggtatagagcgacagtttaccgattggaatgcccatcccaccgatgccctggtcaccaagccccagaatacgttcaccgtcagtcaccacaatcactttaatattatggttcggcacgttttgcagaatatcgtccatattgtgccggttctggtaagagataaacacgccgcgtgaacggcggtagatctcagaaaaacgctcacaggctgcgccgacggttggggtataaataacaggcatcatctcatcaagatgattgtttaccagacggtagaagagggtttcgttagtgtcctggatgttacgcaggtagatgtgtttgtcgatttcggttttgaatccctgatactggatccatgctcgttccgcttgttcttcgatggtttcgaccacttccggcagtaaccccagcaggttgaagttacggcgttcttccatgctgaaggcactgcctttattcaacaacggaaattccagcagtacagggccagcgtaagggatataaagcgaacgctgtttttttgtttttggttccatgtcactcactcttttttgaatatccatccctggcacgcttttatcgtctttgctttaccaccaggcgtcggccccaagtataaagcagataaaaacaaaaacaccattgcgcaggcaatggtgtttaatcgtcattgaggactgatggttatgaattacttttcagcggggcgttttctgccggttgggttatttaccacgctggatttgtcaccttcggtaactattttgcgctggttagaaattttatggtccagtccaagaatatgacgtgcctgacggttcgatttcattttaactcctcaatcctgttgctagttttaaggacaacatcgccgtagcgaagaaacacgtgctaaacccctaaattaggttgccgatcaagcatagcaccttaaagcgtagggtgctggccactgaccacataattgatcgtttgctggtagatatcactgaggatgtcgttatcagaagcttccacccatttggtcagctccatgagaatgtcatcttcagtgacaacaccgtgctctgcccgaaggccttgctcaatggcattaaccagagcgggttctgctgttgaattttctgcctgataataagtaaacatagtgattctccgtgtctgtgtatttatggtgtctgctacggatcgcagatttataaagcacattcagcatggcaaatatttgccgcttcgttgttaagattagtcctggttgatgatttttatattttaacctcatgatattgataggtattattattgtggtgagttgattaatattaatgcaatatctcttgggttatatattcccggttatctattgtggaaatttaatttaagtgcagaagtaatatttctgccggatttttattcggaatatcctgcttatcctcgtgctgtttctcacgtagtctataatttcctttttaagcccacaggagagcaacaatgacaatccataagaaaggtcaggcacactgggaaggcgatatcaaacgcgggaagggaacagtatccaccgagagtggtgtgctgaaccaacagccgtatggatttaacacgcgttttgaaggcgaaaaaggaactaaccctgaagaactgattggcgcagcgcatgccgcatgtttctcaatggcgctttcattaatgctgggggaagcgggatttacgccaacatcgattgataccaccgccgatgtgtcgctggataaagtggatgccggttttgcgattacgaaaatcgcactgaagagtgaagttgcggtgccgggtattgatgcctctacctttgacggcatcatccagaaagcaaaagcaggatgcccggtttctcaggtactgaaagcggaaattacgcttgattaccagttgaaatcgtaaagcattgccggatgacgcgtcaggcgcgtgaatgcctgatgcgttgttagcatctctacagcgcccgccagcaccggatctcacgtccgtcctcccttattgttaatgattgccggacttcacatccgtgggttgccagagggcaacgttcgtagaaaaaacagccttgcggcaacgtgcggtttcccggcagatccgttttacgtaatgcccattcttcctccagcggtttatcaatggcggggagggaatccagcaataatcgggtgtatggatgtgcaggtgccgtcaacacctgctgcgcgtcgcccagttctacaatctgcccgagatacatcaccgctacccgatcgctcatatgacgaatcaccgagacattgtgtgagatcagcacataggtcagcccgcgatttacctgtagcgttaccagtaaattgaggatctgcgcctgcacggagatatccagtgcagaggttggctcatcaagcacaatcacgtcaggctgcgaagagagtgctctggcaatggcgatgcgttgccgctgcccgccggagaacgcatgaggcaggcggtcgagatactccggacgaatacccacctgcacagccaactcctctgctaacgctcgccgctgttgttcactactacgcttagctatccagagcggttctgtgatgatgcgccacaccggtaagcgcggattgagcgaagagagcgggtcctgaaacaccatctgcataatgcgttgtgatcctgaacggatgtactgcccgtggctcggttgcagcatacccattaaaagctgtgcgagggtgcttttgccgcagcctgactcgccgacgatccctaaggtttcaccacggcggatctgtaaatcaataccattaatggcatgaacatgttccgtagttttaccaagccagtttttacgggccgggaaattgatatggacgtcgcgtaacgttaataacgtgtcagacacttatgacctcctgctgcggataccaacaggcgcagcgctggttgttgtcaccacacgctgtcagcgccgggacgttttcacactgtgcacctgccgcatagcaacgatcgcgaaaagcgcagccttcaggcaaatgggtgaggtttggtaccgtccctggaatggcgggtaatggctggcgtggtactccatgttctggtgcgcattgcagcaaaccaatggtatacggatgccggggatgatggataatgtctgccgtcacgccgctttcaattacgcttccggcatacatcacgtaaacgctatcgcacagttgcgacaccacgaccatatcatggctgatgaacagtaccgcagttccactggcgcgggctttatgtttaagcaaacgcagtacctgcaactgcaccgtgacgtccagcgccgtagtcggttcgtcggcaataatcaattgcggctcgcaggagaatgccagcgcaatcattacccgctggcgcataccacctgaaagctcaaacggatagcgcgacataacttccacggcatccgggatttgcatctcttccagcagggcaatcgctttagctctggcttcccgacgacttattggttgatgatggcggatcacgtccatcatctgaagacctattcgaagtgtcggattgagggcggtcatcggttcctgaaagatcatcgccactcgtgcgccgcgccattgacgaagctgtttttcccgagcgttaagaacatcgtctcccagtagtgaaatctgcccccgatgtacgcaataactgcccgtcggtagcagacgcataatcagcattgcggtgactgatttacctgagccggattctcccaccagaccgacaatttcaccgcggttaatctgcaaggacacattgttgagcgcgtgaacatcaccgttaaaaccggggaaactcaaatgcagctgttgaatgtccagaacgggttgggtcatgactgctttcctcctgctttcgggtcaagcagatcgcgaataccatcaccaaagagattaaacccaacggcggtaagcaaaatcgctgcccccggaaatgcgcaataccaccactgatcgagtacatagttgcgaccatttgctaccatcgcgccccattcagcactcggttgttgagcacccaggccaataaatcccaacgtggcggccattaaaatcgcgctaccgatatccagcgatgcctgcacgatcagcggcggcagggagttacgtaaaatatgccagctgatcagatgccaacgcgacgcaccaaaggttttcgccgcctgaacataggtatactggcgtacaactaatgcttgcccccgcgccaggcgcacataaaagggaattcgcacaatagcaatcgccagcatggcgttaaataaactcggcccgagagcggcagccagtgccattgtcagtaccaacgaaggaatcgacagcataatgtccatgatgcgcatgatgatggcgtctgcgcgtccgccaagcacaccggatagacatccgagtagcgaaccaatcatacccgcaatggcaaccacgactaatccggcgagaattgattgctgactgccgaccagtacgcggctgaacagatcgcgtcccacttcatcggtgccaaaccagtgcgccgcagaaggcggcaaaaggcgggcggttaaatcaatggcgttgggatcatgcgtcgcaagccacggtgaaaaaatcatcatcaatagcattaatacaatgatgactgcgccggtcacggtgagcggactgcctttcagcatccataccagttttgcaccgttaaatcgcgtttgtttttgtgggcgtacggcggacgtttcctcgcttagcatcattcaccacctccacgtccgatacgcggatcaatccacaaatagagcaaatccaccaccaggttgaccagcacataagcaaatgaaaccacgacggcaaagcccatcactgccgggaagtcgagcgcctgtattgatgttactacccatgcacccattccgggccaggcaaaaacggtttcggtgagcactgcgccatacaacaaatcgcccagcgccaaacccaatacggtaatcgatgggatcaacgcattgggtagcgcataacataaaacgatataccagccgggcaagccgctggcccgggcggtacgaatgtagtcttcactcaattgttccagcatcgctgagcggatctggcgagcgacaattcccaggtgaacgaacgccagcgttaatgccggtaagatgagatgttgcaacgcattgaagaagacttcaccgttgccttcaagcaacgcatcgagcagataaaagccggtaacgtgcgttggtggatccagccagtcatcaagccttccgccgccgggaagtatttgtagatgaccataaaacagcacaatgacgcccagcccaagccagaacgcaggtgtggagattccggtaatggccattattcgcaccagatgatccagccagcgatttcgccagactgcagagagtatgcccagcgggatgccaatcaagagtgccagcagcagggcacaaaaagccagctccagcgtcgccgggaaaaatatacgcaactcttccagcaccggacgcccggtacgaatggatgttcccaggtcaccatgaaacaggtcgctgacgtagcggtaaaactgtacatacagtggctggtccagtcccagttgctggcgaatattttccacgatagcatcgctggcgcggtcacccgccagtaaccgcgccggatcaccagggatcagatgcgagataataaacgtaatcacgcagacgcccgccaccacgagcaccagcccccagcagcgttggcgtaaaatactccagaaggtcacgttatttactcatggtattgatattgaagacctgttccagcatgggattgaacacaaagcctttcacctctttgttcatcgccagttggtagtttttctggaacaggtacacataagcagcgtcatcaatgacgattttctgtgcctgctggtagtcccgggtacgctgcgtctggtcggtggtcgcaagcgcattgcgcagtaacttatcgacctcactgttttcatagaacgagcggttacccggcagaccttttttgtctgactcaaaccagtaattcataaacatatacgggtcggcaaaatccggactccagttgccaatcgcaatgtcgtaatcacctttacccactctgtcgcgcatggtggcgttcgccagcttttccagcttcacattgatgcccagcttgttgagactggattgtgtcgccaaagcaataggctcccagttcggatcgttatcggagtagagaaacgtcaggctggtgggtttgctcgtcactttatcccattcggctttggctttcgtttcgtcatggttgtattgcattgccgtcgcatcgtagccccacatgccttccggaatcgggccgcgcatctgttttccgttaccactcagaatgccgttaaccatgccctgataatcggtagaccaggaaatggcccgacgcagatccgcctgattaagaggcgctttgctgttattcagatacagataggtaacgcgcagtgacggatactctgccacattgactttattttcctgcttcagggcgttgagttgatccaccggcagcgcatcggcaatgtcaatgtcgccacgggagagctgcaggcgacgggaggcactttcaccgataatttttaccgatacccgtttgaagttcggtttattgcctgggtaatgcggatttggcaccagaactaattgctgacctttttgccagcttttcagcataaatggtccggaaccggcggtattttgcgcgaggaagccgcgagcatcatccgctgcatgttcctttaagaccgccggattgataatggatgcaccgtcattcgccagcgtgtagaggaacggtgcgaatggttggctaagggtaaacttcaccgtatgttcgtcgggagcatcaatctttaaatctttgggaaatgcttctgctggcccctggccgatttttagtagccgctcaaaagaaagttttactgcttcggcagtgacaggtgtgccatcggcaaatttagcattatctttcagggtgaacgtccactctttttgatcgtcagacgctttccagctacttgccagatcgccttcaacgtcggttgagcctttatcaccgtccgttttgtgctgaaccagccgctgataagacgggtaggtcactgtccagtcgttattatctattgttaccgccgggtcgagggtttgtggatcggcggccttaccaatcaccagcatatcttttggtacggcggcgtgcgcaaccgggaaatttgtggcaaggacgagcgcgagcaatgtgggacgaaacgatatcgatctcttcatgacagtttcctgattaactgacgtgctgtgtgccaggggatataaaacaagagaattgatcagcgagcagagggtaactcgctgcctggggtaattcgaagtgccaccattcgctggagataccgacaaaaccgccaccagtcattatcgcattcagcaacagccgattgcgctgagcggctggcgggacggaagggtgataggcatgggagcgctcgtgcatttcatcgaaccctgcgcccatatcgaggatgttcccgtgctcatcacgaagcgtcaggtcgatcgccgtgccacggctgtgattagaaccgaccgtcacatcaacaacatattgcgggtctgggcaggcttgccacaacatcgcctgtgcttgttgtgggcgatacgcatcgtaaatcaccagttgtaagcctgacagctgggcgatgctgatacttttcgccagcgcggtaatcgcatccttgtgtaacagacaacgcgcttgctgataaatagctttacctgtgatgttatcagcgcaggcgtatttcaattcgatctccagatcagggaagattacggctaaatcaaccagttcggtggtatccgacataaacggttcctgtataagacaaaaattgctgcgctttccgcttatgcagatctcatgccatgccgggagaagcgccagaatgctggcttaaagttatattttttaacttttgatcaacatttgtgcagcgtagtgcagttttggtgcaagaggggaagttaaggaaggaatctcccggaatcgtagctgaaatcacagtatttaagtgacagtgtcaccttaaaggaaaacccgcgagtgcgggcgagaggaatttgtcagattttcagcggtaacacgctgctcatccagcctggaatttcttcggcgggaagggggcgggaaaagaaatatccctgaataacgcgacagtggatcttacgtagcatctcaaattgctctttggtttcgaccccttccgccacgacggttaaattgaggctttgcccaatgctggtaatggcttcaagtaaggccaggatgcgtttttccgtcagacaacgatcgacaaaacttttgtcaattttgatttccgttaccggaagactgactaagcgggataatccggaaaagcccgtaccaaaatcatctaccgataagcccacgcccatatcacgcaggatctgaatgcgcttaaagatttcggtatcgtgttccatcatcatgctttccgtgatttctaccgtcagctggtggccgtcaataccccaggcgtgcattgcatcagacacctgattaggcagttgattactgcgaaagtgcagtgccgacaagttaacggaaagcgccgggatatgaatattctggctacgccattctgctaactgacggcaagcttccgcgatgacccagcgcccaatattttcgatttcaccaatctcttctgcgagaggaataaaccgtgaagggggcacatgaccatgctggggatcgtgccagcgcgcaagggcttcgatgccgtacagttcacccgtttctgcgaagatttgcggctggtaaacaagtttcagttggttattgctaatcgcttctttcagcgctgcgcctaaaaccaaacgctcttttaccatttcgttcatcgccgggctgaagaactgccagccgttaccgccattcttgcgaatataatccattgcattgtgagcagtggagagtaggtaatcgcggtttttacccacgtcgtagctgatgccaatactcaaggtaagcgggaatggtttatcgtcaatcattatcggcttgctgaccacattccgtagctcatcggcgatctgggtaatgttactgacgtcgttttccaggctcacgaggacaaactgcgtaccttcgatacgacagagatactgatccggtttgagtttttcacgaaagcgattgaccacttccagcaatgcctgatcggcccacgcatagccaaggctatcaatcacatcctgaatatggtcaacaccgatgagatacaccacgggagagacggctttgtcgaccaggtcatcgaggtaattgtgcaggttattgcgatttggcagaccggtcatcggatcaaattggatgagttgttcaatatgctggcggcttttttcctgttccagcgccagcgcggccatatgctgactgatatctgccacgcgttcgataaaggcgctggtttctgctcctgacgaggttttaatttgcaggatccccgcaggcgcgccatcacgctgacgaatggtcgctgaccagctttgcgcattttgaacttctgcaccgtgcgaagatgacgcccagtgtatcggcatcccgttgcgcagtgcgaacagcgaaacatgcgattcgttgagaacagattcgatgttacgacaaatgatttcccccatttcatgaaatggcgggctgctgcacatggcggcgagaatattgccttcaagctggcggatttgccgttcttcggtgatatccgagaaagtcattaccaggttctgcagatgcgcgagcacgtcataaaccgggctgatagaggctttaatccagattttttcaccggtgcgcgtcaacagcagaaattcgtcctgatcgcgggcggttttccatagcaactgttgtaaacgaatgcggttatcggcagggaattcaggaatgttcaggagtgtatcgggctgcataccgctggcttcgctaatgcagtaaccaaacatttcggtaaatgcgcgattgcactgcacaatatggcgttccggatcgaggacaatcaccggtcggtcgagatggtcaacggcaataatcaattgtcgagtctgttctttttgcgccatttctacgctggcatcccgtaccagcgccaggtaataaactttcccctcggcgctcactttcgatagcgcaaaacgggtccagattttactgccgtcttttttctccagctgcagctcccgactcatcccctcgacacgcgctttaccgccttcacggttatgacgaatgtattcaggatgcgcaggacgcaaatcccgcggaatcagcatatcaatgttattgccaatgacttcttcacgtttgtacccccagagcttctctgcggcggggttgaaaaacatcacttcatcattttcgttaattaacaccgcacccatcatattttgctcaagggcggggaaaaaatgccatcggcggcattatccgcatcggttagcttcatgattacctctgcatcctggcgcatctaaagactggctttccagagttcaacacggtttctacctcgtcttttggcgatatacagagcttcatcggctatttgaatgaggcgctcatagtcaggatgaccattaaacatggcggcaccgatggaaagtgagagggcaatatcctcgccgtttgcggctttcagtttggttttctccacccgactgcgaatacgttctgcggtacgtaacgtttcgttttcagaagcttcagtcaaaacaatgataaattcatcgcccccgtagcggaaaacataatcactactgcggacgttgtcataaaaggcctgagagactttacgcagaatttcatcgccagtgttatggccccacgtatcgttgatctctttgaatttatcaacgtcaataatcagcactgacagcggtgtaccggtccggttggcatgggcaatttcgcgtttgaagatagtcggcaggaaacggcggttaagtaatttcgtcagtacatccataccgacttcgtggcgcgatacttcttcaaacaattcacgcagcaaggtaataatttgcgatacggtatttcttatctgtaatagaaacttcacccgcaaacttctgttattcaaattcctggtgttacgcatggtttgattgaaaataccgtcgaaatcctgaatcagacgggagatatggcctacttcggcaatgccgctaaaataatgtcgacctttatggttaaaccacaggccaaaatcagcctggcttaaaggcaaactactgcctaaatcagaatccagcaggattttatagataatatctatttcccatgaaagtattgaggctatttgccgttctttttcttcttcggcgttttccagtaacgagaagatacgatagttttcatcttcctttgaggcactactgtcactaaaggtaaacgcgcgggtcatcacttccatagcgatatcaatactgttaatcgagaaatggtagacctgaagtttttctgcggcagaataatccgaagagaagattaccggatagaggatttttttcagcacccgaaaccccatctcgacaatttctaccggaattcctatgcgggcatgcacttccgcgacggtatgctggatttgtattagcctttcgacatcgtcaacctgggcagaaagcacgttaataatccagcgttccatcgcacttttcaactgccgctcaacttgttcattactcaagaattcttcggcatgcgggtcgatgcggacaattcgataaaactcgatactcagataatgagcatgcgcaagggcaatttctgcggctttagcacgaatgagaggatctgcctgttcgacaagtccggtccactcatctttcattcttttaaaatacatctccataattcacacccttataaggctgggaaatcagacggaatcaaaacgcaacgtgcgagatcgactaactgcaccatattctcctgaaatatgaagatatactgaaaagaaataagcgacttaggacagttttaatctacgctactgttcttcagaagagtatagcccatcgtaattatttttcggtgacagcgaatatcgtatgttttttcatattcatacatttttattaggggatttatggctgtttaactaagtgtggttaattgcgtggttaatttgactttagtaagcatgattagtagtgggatagttcaagagggtaacaagccggtgggtaaagcaccggcttgttacaaagtaagaatgggagtttaactgccccaacgactttgcagatagctgaccgcttgttgagtctgcggtttattcagatagtcctcacggaacaagatggtgccgctaatttctggtaccgcatcgttaagatcgagctgctttttcagttccggtacgccgccgttaatcatccagtctggctctatctttgaaggttcacccactttatagaaggcgataccgatatacaggcgggtcctggtcggtttaacgacatccgcccaccattttgccaacacgtcataacgcgcggcactccgtgagaacggccagtaaatttggggagcaatgtaatccagcaatccttgttccacccatcgacgggtgtcagcgtaggattcgtcataggctgccgcgcctcgggtatcggaaccgagcggatcgtgtgatcggttacgccacacgcctgccgggctaacaccaaattcgactcccggcttaatgcttttaatggtgtgcgatacctttgcaattaactgctgagtattgttgcgccgccagtctgcttttgacgcaaatgcgcctccgtatttacggtacgtttcgttatcatttagcagtgaacccggtgactccgtatagaaatagtcgtcaaactgcacgccatctaccggatagcgggaaaccacttcggcgactattgatgtgatccagtcctgaacctcagggatgcccgggtcgaggacaaagcgatcgccagacgttctgatccagtcgcggtgttgcacatagacgctcgccggttgttgagacagagtgctattcagttccctgatagtaccgggcttcgtattaaccgatacgcgataggggttaaaccaggcgtgtactttcatcccacgcttgtgggcttcgtcgagcataaattgcagcggatcgtaacccggattttcaccaatcttaccggtcataagatcggaccacggcaaaattttcgatggccacagggcggtaccgtccggcttgacctggaaaaagaccgtgtttatgccgagacgttgcagatgatccagtttgtcgatcatcgcctgttgttgtacacgggcccggctggtggggttactaatgttaaccgaggaaaccggtggccagtcgagccgagaaaccgtggccagccagatgccacgcatcggttgtgacgattgttgcgtcgtggctggtggctttgaacctgctggtggtgtcaccatggactctggaggcgtgcttttacaactacacagtaaaagtgccagtgcaactagtatcgctggtcttctaatcgttaatttcttgtttcgggagcagatatccatatgtgctggtttccggtaaacagatgtgcgctcattctcgtacttatcccggttaagtcaatacgacagcaagcacgaaaaagggagcgatgacttatcgctcccttgtcttataaccattcagacatggttagtgtttcttgtcattcatcacaatatagtgtggtgaacgtgcacgcgggtgcaggaagaagtgaccttttggtgcgttctgactgttgattggctccagagtgacgccggtattcgctttgcctttacgatcatgaacagcatagagaataaagggcagggcaagtaccaccaggaaactaacaaccagtaattcaacatacatatcggtagaatcaccctggatgttatccggcggcaggaaggaaacaataaacgccataattgaagtcagcagaccgacaattgccacgaccagtttcacccctttaccaccagggatattaaatgtgcgttttaagtcaggatgtttaagaaccaacacaatgtagccaataaacagcatgaaataagcacacagataaatcaccaccgtcagcgccagagcgatcaggaaggacatgttgttaccgccaccggtattggtgaggatgatcaacgcgatagaagtaatcaccagctgcgaaatgaccagcgttaccggtacgccatttttgttcattttagcgaatgccgctggcagcaggtttttctgcgctgtgacatacatcccgcgagaaggaccaacaatccaggaggcgatttccgccagaacacccagcaacagcagtgcggagatcacgcgaaccgtccactcaatttccggtgccacatgggacatcagaacggtaaaggtttgcattacccctgcggagaggttgatttcattacccggaatgaccatcgcaatagacaaaccaccaacagagcttaagcagattgccgccaccatcagcagtaacatagccagtggatagtcgcgccctgggttactcatttcattgacgtgggttgcggaagcttctacgcccatataactcaaaatgaaggcaacaaatacaaccagggtgcccactttagagaagtcagggaagaaggtcttcgaatccatttcgatagcaacgggggcaccggagtgcagataaatagccgctaatgcgatcaaaataaatgcaggtaacaggataccggcgaagaagccaactttagcaattcgcgccgtgtatttcgtgccaccaaactgcgttaatgccagcgcccaaagaatgatgagtgctgcaatagttttggtaatggggtcttcattcagcgctggccatttcaggatgtaggagagtgcccctaacacgaaatagagcatcggaataaaaccaatggcgatttgcagatagccaaatgagatcgctgcaaatccccatctcggccccagagtatttgatacccaggcgaagacaccaccttcttcccagccgtcgacggtggccatttccgcagcacaaagtcccacgggaataaaccataaaatcccgcctaatagcaggaagaagactaatgaaaagcccgatgttgcgaaggtagggtattcataaacagccattaccatcgatgccgttatggcaaagaatccgagtaatgtgagctgcttagctttacctgtctgtactgatgtagccatattatccccctaaaacggtattcctgtcggaaccgcacctgttttgttctgaagcgtattcagaacaatattttccgttgctaatgccagtgaacagactttggaaattgtcccgaaacgggttcgtttcgggacaccgttaccgttaaacgttatcaggtatgtttaaagctgttctgctgggcaataccctgcagtttcgggtgatcgctgagatatttcagggaggctttgtagtcttccagcaacagttcagcaaagtccatttcgaagccgcgacgacacataatgcgcatcaccacgatgtcggtggcttcaccgccgagagtgaaggccggaacctgccagccgcgcagacgcagacgttcagagaggtcgtacagggtgtatcccggatcttcaccatctttcagtttgaagcaaaccgccgggatgccttcgtccgggcgacccgtacagatgaactcatacggccccagtttggcgatttcatccgccagataagcggcaacctggtaagaggcgttctgtactttggtgtagccttcacgaccgaggcgcaggaattcatagtactgtgcaattacctgacccgccgggcgggagaagttgatggcgaaagtaccaatttgaccacccaggtagtcaacgttgaacaccagttcctgcggcagcgcttcttcgtcacgccagataacccagccgcagcccagcggagccagaccgaatttatggcctgaagcactgatcgatttcacacgcggcaggcggaagtcccagacgatatccggggcgacgaacggtgccaggaagccaccgctggcagcgtcgatgtgcatgtcgatgtcgatacctgtatcggcctggaatttatccagcgcatcgtgcagcggttgtgggaactcatagttaccagtgtaggtcacgccgaaagtcggcaccacgccgatggtgttttcgtcacaggcttcaatcatgcgtttcgggtccataaacaactgaccggggcgcatagggatctcacgcagctccacatcccagtagcgggcgaatttatgccagcagatttgtaccggaccgcacaccaggtttggtttatccgttggtttgcctgcagcttccatacgcttgcgccaacgccatttcatcgccatcccgccgagcatacaggcctcggaagaaccaatggtgttggtgccaacggcctgaccatttttcggcgcaggcgcatgccacagatcggcaaccatatttacgcaacgcaggtcgatggctgcggattgcggatattcttctttgtcgatccagtttttgttaatggataaatccatcaatttgtggacattttcgtcgtcccaggtctggcagaaagtggccaggttctgacgagcgttgccatcaagatataattcgtcattgataatctggaatgcgacatcgtcgcgcatttcgtgcagcggaaaacgttttgattctgcgatagtggaaatagacttcgcaccaaaacgtgaatcgagtagttccgaccttaaatccgttacttgcttcttatccattttaaactccttaaaatgattggatcgcattaaaaaagtaggatttatcgataaagtaagcaagtgcaaaggactcgtatttaaataacaaaatcctaatgttatttatcgtgagatattacgcgaataatattttttcattgaaaaacaatgcaatatgaaattcttgggtggtggtaaggtgttttatgctgttatttttatgcgcattctgtgtctcctgaattatcacgtaaaaatcagaccttaaaatatcactattagtacttgattattattttgaacgcatttataaaattattatataaaaatagcgaatattgctaaaatccccgccaacgatgtgttgacggggctgttattattttggcaataatactccggtataagtatttaccggatgagaaagatattgtttaacggcagtgttaacattctctaccgtcatttgtttcaacaattgctcctgctcagtccatgctgcaggatcgtcatattgaataagactatttacaatagtgttcgctaattgttgaacgctacgctgttggatatcgaggctgcgctgaacgttttgctggtattcattcagttcttgctcactgatccctttagccagacgcttaaccatcacttcattcgctaacgttaacagttcatcatgtcgttctggttgacaagtaaaagccagcaaatgactgatatctttggcctgaggatcaaccgagaggcgagaagaaacgctgtatgctccagatgcctgttcacgaatattaacacgtagatcttttgccagtgcgacgttaaaagcatcgagcgccatacgcgtcgccagattaacaggtgtccgggaatcataacgcttccactgtgaaacctgtgccacaggttcattttgttcttttacagtaaccgatgcgttgtccgtcgcgcgagttaatggtttacctgcggctaatggcgaatcagagtgtttgattgatcctaagtaacgcgtaattaacgccacgagtttgtcttctgagacattaccgacaatgacaaacgtgatatccgctggagatgaaaacaactggcgatcggcagccagcgcatctgcggcagtaaactgtacaatctgattttcttgcagtaatttcgtgcggtcatcagcatagcgcgtctcatacatctgctgggcgaatttctccgctggacgctggtcgagcgttttcaacgcctgaatttgagcattttgtagcgatgcccaaatattgtcgttaatcgtgctgtgggtgattcgctggttaatcaactgaaaaccaggttcagggttattagtccgcgcgctaacggagagcaacgtattcatgccactgactttactgctcatggttaccgaattttccgcactccagcgtttcaggctggaagaggagagctcaccaacgccgcttccgcttactgctttatttgccagcgcgataagtgatttttgctgcgcagggaaacttaaatcgcctttattcgatacggcagtaatttgtagcttttgctcttcacccgcggattttgccagaataaccctggcaccattggaaagtgttaatgatgtcagattctcagccagcgtttctttgctgctaatttccgcctgtgggtcagcgtctactgttaacgataaatttctgcctgggaagatgtaagccgccagctttttgttggcgtactctttttccagcgccaggatagccgcaggagacaatgcttttttggcggcaagctcattgtttaccatttgctcccaaaatgcgtcctggttctttcttaactgctgccatttttccgccagactttgcacggtaatttgctgccacagacgtttcgaaagttgatatgtctcttccggcgacaagaacggcgtattatttaatgagctggatgccaggcgactggtcagcatacgtaaatcacgttcagcttgctgatcaaccgcatttttcagccaggtgaggcgggtagatttgacatcatcgagttcttcagcagaaaaaccatgctgatcaatggttgccaactctgccattaatgcattcgcagcttcctgcatattatcgtctcgtgcatttacacggaaaaacagcgactgataatcgggtgcaattttaacgctgcgcgcagtgccgccagaaatagtcttcaactcgcccgactgtatgcgttcctgcagacgttgattgaacagctgaactaacatgctccattcagcttgttcgataaagctttgctcatcgttcacttgtaccattggcaggcgataatagagtgcgatgccgttcacccggttttctttatcattaatgatattaaagcgcaggtggttttcggcttttgtcggccagacgcgattttcagctgctttgttagccggaagcttacttaaattatcctttatcagcgccagcgcttctttactgtcgatatcgccgaccacgataaaggtcatattatttggttgataccagcgttgataaaattggcgcaattgtgccggtgtgaccgtggcgacagtatccatcaggccgataggttcacggtctaaattacgggtattagccagcaggaaagggcggcgcgcctgagaggtgcgccatttcgcatcctgatgggcacgccattcctcagtaattacgccacgttcagcgtctacttcgagtttttcaaaggttgcggcattactccattcactgaagattgccatcacttgttgcagattttgtttctgcgtagtcggcaaactcacctgatacaccgtttcgtcatagctggtataggcattaacatcgcgaccaaaacgcaggcccattgactcaaatgtttcgatgactttattacccggccatgtttttgtgccgttaaacatcatatgttctacaaaatgagccacgccgcgctcattgtcttcttcctgcaatgaaccggtatgaatttgcagccataaatttacctgatcctttggatgagcatgcggataaatcatatatcgcaagccattgcccagttgcccggtaattaacttttcatcctgcggtaaggcggcggcaatcagccgcccggggagcaacagagttgccactaacgtcagtaagaaacagaggtttctcataattatctccatgcgaaaaccgggcgaatttacccggttaagtaaaatccgaactattaaaatttcatgctgacatcaagccagaaagtacggccactggcgtaggtcgccacaccggtattcgttgtatcaacagcggttttgctatccaatacattgagaatatcggcactgatcgtcaggttttgttgtttcagaaattgtggcgtccaggacaagcgggtgtcccaggtcaggctgctatccagtttttcgtcaacatactgcttgtaatctgaatattcgctgatgtattgcgcatttgtcttacccaggataatgcgagctttacgcgcttcttgccaggccagcgtattcgcccacactaacccgctcggttgatgcgtgaaatccatgtttaaggagatctttaatgggttattaaaatctgccactggaacgctatcgtaagaaaccagattaccgttataaaccacctggttatcaccggtattgctctcctcataaccattgtttaacgacaagttgcccttgctcttgatatagctaaagacaatttgcgggttaatatctacctggctgatatgcaggggttcggccagttcaaaactgaggttgaacgaatgcgtttttgttttgccgtcgttgttatattcagtaatggtggttttagtcgcgctgtcggtacgactgcttttgctgatttgatcatgcgcttcacggtaaacatagtttgcgcgcgcaataacgttcttaccgattttctgctgcaatcccattgccagttcatcgttataaggcgttttcaaatcctgataacacgtcagggttttattgcctgataccgattccgtccagctattgcggatatcacgtaatcccatatcaagaatattcccgccatagtaacggttataacctgctgtaatcattgaggtttgatcagcaaaaatatcccattccgtcataaagcgcggggagatattgtggtttgacagatagttgtcatagtcataccgcacgccgggcattaatgacacattacgccagctaatgcgatccgccatatacagcgtgtagttgtcaattcccaggctgcctttacctttatggtaaatggtatggttagttttctttccggcagcattaatcacataggattcagactggttatggcgttcagtccacgcatcggaatagatgtattccgcgccgaagtagggttgatgcgaaacattacccacggcgaatttttgccagtccaggcgtgttttgaaggtgtaattatctacagcctgggaaatgtgtcctaatccgccactggtgcaacgccctgtaatatcaccatatgtacatgaaagttcggtgtaccagatgtcatgatcgtgacgggtataatcactaatatgatcccaaccaacggtggtacgcagtttggcccatgcgagctgcgtatccatatcccatgccagaccgtaggatttattacccatttcgcgatcagactgcgggaaggtgctggtattataatcacggctggagccggtatattttaaggttaaatcgtgggtaaagcggtcgctggcaaaccaggtaaatttgctcaatgcagtatcgataacgtttttatactgtgcccgaccggcgacaatgccgtcattcgaaacataatccgcgcgggtgatatcagactggcggcgcgataaaccggcggtaacgccgaagttatcagcgagttcctgattaaacgacaagatataaaagttctttttaaaatctggggagtaataagtacttcctgaagagccttgattaaatgcgctcttgttattctcatcgatatgcgatgttaaccagtccgaacgcgtagtgcgataacccaatttaaccttgctatcatcagcgttgaagcgtttgatctttgcatcaattaccccgccattgaagcgaccaaattcaaccggcacaaaactgtcataaagcgtcacattgtccagtaagctgacatcaagataatacccctgtgacatcccgctaatattggttgcactactggcatcggactcattcgctgggttcaggttattagttgcactaataccgtcaatcaaataggcattctggtagggcgacgcaccgtgaatagagattttctcagggcgaatatctccctggttcaacgaggtactttgcgttgaatccatgcgtaccgcagggttggttctcagcagatcgctgatattgccattcccggtcggtaaacgctcgatgctttcactggtgtaatgcgtgttgccgtttacgggtacagggacaggagcatagaccgtcatctcttcaaaaaaatgcatgtacatgtttttgtcatcgacggcctgcgccacatcagcgccacataaaatgacgccaggaataagaactcgcttcatttatttatatctccgtacagcagggcttttattgttgttataaaaccgtgctaatgtcacaaatatcatcagccaggttccagacaccgggttgatgtgtaaccataatgacgccgcttgtgggtagtttttcacgcactaaacgcagtaagcgtatagcctcttgttcctcaagatgagaggtagtttcgtcaagaaatatccatttcggacgtcgtaaaattaatcgtgccagggcgatacgttgtttttcgccgctggaaagaatatctccccagcgatcgtgctcatgaatacgcgcagccaatttccccagaccaacctgatgcagtacttcgctcaacgatttatcgtctacgggcaggggaagtgctttacaaataatctctttcagtaagccgcttttgattaacggtgtttgtgacacataccaactgtcagcaggagaagaaatatcacctttaaaccacggccagcagtgggataatgttttaagcagtgtggtttttcccgcaccagagtagcctttcagtaatagccatttgcctggcgaaacatgaaagttcaagttctctaatatgatcttattatcaggcgtacgaatactcgcattagccacttgtaccgcatgttggcaatttttaggcttattcgtagggcgctgttcagtgagttgatggaactcatacaagcgatcgataaccgcagccagctcagcaagttcgtcatatttataaataaaccagcttaaattgttcgatactagcataaatgcctggcgcgatttcattagtccgcccagattgatctgcccgctaataaactgcggcaataacagaaagtagggaagaacgctaagcgagcgcgaataaatattttgccagtaatcaagccaccgctgacgattcattaaacgatgccagttctctttaatggtatgaaaattgtcgctcaactcctggcgttgtagagactcagcattgcttagcgcaatcagttctgcctgcttattatgctgcacaagattagttcgaaatgtcgcttcgctacgttgtttttccacattaagcggacgaatacgcttaccaaccttatgggtaaataaagttccaccgatcacaatgagcacaacggtatagaccatatacccctggatattccattctgttccaccaacagtgaatgagagcgtacccgcgctttgccaaagaataacggtaaaggtgatcagcatgctaagtgactggatgaagccaaatgaaagactgagcgttttgctgattagtaagagaatgtcttcagcgatacgttggtcagggttatctgtatttttatgctcgccgtagatctgcgtgaagtagtagtttttatctgcaaaccagcgattaaggtagtaatctgttaaccattcgcgccagcgaatagtcagcagtttaattaaccatgttttgttcacggatattaatacaaagatccccagcagggcagggaaccaaaggacaagctgccaaagcttatcggtttctttctggcttagcgcattgaaaaatcattattccagtcgtttaaccagacctgaattttaaccacgccaaggatcatggcgaggataataatgattaacagcactgaagttttattattcttacgcagccaaaagggcttcaacagacagagatactttgctatcaacatacaaaacgtaatgggaatggttatcattagcgaaaattgattgtgccatccaatgattatctatggcaatgatttactgatgaaatttatttaagtatcatttaacaatatgaaatataaaggaatatttcattttcagtggttatggttatgctattgataatcaaggatattgctaatgccctgatgcataccacgtaagccaggattttcgcaagggaagatgatgatgacgaaacacccgacaggaatttatgtcgggtgccttgttaaggtcataagaaggaggctaagaatggagttaaaagagagcgttattaattattctccatttgttttgcaacatccataatgtggtaaagcggtactctgttcttagctaactccaccatggcgttcatataaggtaccatggttgaaaaaaggattttataaccttcgcaaaaataagaaacagtctcattgtttactttagtaatacgatgcttaggacaaccgccattgcagataggtttatatgcacatttcagacatttcgctgaaatccgttttttttgcgctgtcagttgtacactgttcatcgttttgagttcagatttattaatgtttccaattttgtactgtggatagacaaaatggtcgcattcataaatatctccattactttcaacaaccagattatccttgcaggactcctggaaaatacaactggtatgcccattccctaaaaaacggctgacaaagctttcaaactgacggatgaaaatttcacccacatcgtttttaacccattgcataaaaatggttgacataaacttgccataagccgtgggaggcacagaaaaatcaatgatacggaatgtgttctcactatgaccactgaaatcaatattcggcgtcccggtttcgagcaattcgataaattgcatatgtttactgccgatagattttaaaaaatgataaacctcaagagggtaatggacattaacgttattaatgacggttaacgtattaaactcaacttgatatgatttcagacgctcgatggctgctatcacttttgcaaaagtaccgttacctgaattactgcgtctgtaacggtcatgtagctcctgggggccatcgatcgagataccaaccagaaactcatgttctttgagaaaagcacaccattcattattcaataaaatgccattcgtttgtaatgcattaaaaatacgtttttggcctgcatagcgttgttgatagtgaataactttacggaaaaaatccaggccagccagagtgggttcaccgccttgccaggtaaaatagacctgattgccagacgctgcgatatattgtttgatgaactctttcagagtgctgtcatccatccatttttcatgagtaaactgcgactctttttcaaggtaaaaacagtaatcacatttgagattacattgaaaactggagggcttggctgtaacgtgcatcgctatctcgctcaataaggcggcggaaaattccgccgcatgaaggtttagttatttcgcttcgcttagtgctttcttgatattgttaaacttctcctgatttacttcgctaagcggtggctggctgctgtcgataaactctcttaccacgccttgcatctctttaacgacctgcggattggcggcggcaaggttatctttttgctgtagatccgtcagtttgtagagacctaactgattgttttctactgtatagacaagcgaataatcgttatttctcaccgtataagagaattggcttaagtcctcagtgttggggttatgcgggtaatcgtctgactgatggcgaacaaatttgtggtaattatcccagaatggaatattttcctcgtcaaaccagtgagaataagaggttatccaggtcagatttttatgtggctcgccttgtttcttatcttgcaaccagggcagcaaggaaacgccatccagcttaaggtcttttggaatgctgatatcggctgcatcaagagctgtcgggtagaaatccattgcggaaatcagcttgtcataattaccgggttgaagttttcctttccaccacataaacattggggtgtgagtaccgccaggataggtctgactcttatagcctttttgcgccccgttcagcggcagaggaccatcgataaccgcaccattatcggaggtaaagagaataattgtattgtcatactgtccgtttttcttcagttgttcgagaatgcgttttacaccctgatcaacagaataaacggaagcgtagtagttatctgctgtttgactaccggtattaaattgcttctgatattgatccggtgcaggattatcatttggcaggtgcggagcattataagccaggtaaagcataaaaggctggtcaagtgttttggcacgatcaacaacgccaattgcctcatcggttaactgatcgctgatataaccttttgcggggacacgttcacgatttttgaacagtgaaggggagttgtaatatgccgttcctgcagcgtggaatcccataaagtaatcaaagccacggttttgaggttgccattcttccgcagaaaatgtggtgaagttgtcatgatagtcacgcgtttgtttatcttccggtaccggcacattactgatttttgacaagtgccatttacctactgctgcagtgtaataaccatgattctggaataattcaggcaagaaagtttctgttagcggaataccatcctgagcatcggtattggaatagacaccaaagcgggcgggagctcgaccggtcattattgcggcacgggaggggccggaaacaccgtgtgccacatagccgttagtaaaccgtacgccttcatccattaatgaaaggagcgtcggcgttgatttttgtgcagcttcaatggctttatctatccctattttgtaggtatcgacaacttcacgattttccattgtttttgggtcaaaagatcccttatcaaaaggaagttgtccataaccaagatcatccatggttagtacgataatatttggctttcctttggtactgtattcagtcggcgtaaagtctgagaaagcaacgtttgttttggttgctttcagctttacatcatctgccgcatgagcagcaaatgcagccataccagatgccagtatcaaagatatcgaggtacttacgacacttttctttaatgcagacttcataaatgttcctcttcttattgtacttaattccgaagtaattttacgaagagaaataagtggatgtaagtgaagttagtcacataaagagatagcagatttagctaaaaaaagggaaataacagtccataaagcgttgacattactttctgttctattaagtaatttctcgccgataaacaactaatttattgatatttaataaattattgcattttactgacaaaatgccgaattgagatcataaataatcatgcaacaggttatgcaagtgcataaatatgtgatggatgtcacttatttatttcaataaatatatcgcctaaaaacaacgcggggcagggaatggctgccccatataattcttacgtagcgtgcgtggttgactactcgttagcaaataatcaaatagctaaagcactcatcgtgttgcccgtattcatacccgtgtgactttgacaacggtactccttagaaactctcttcggactgttgccgaaatgtttgcggaacgcataaataaaataagatgtactggcataaccacattgttcggcaattttattgactgaaccttctacgcgtatcaaattttttgcgtgctgcattctggcatctaatagaatctgtgagaatgtcgtttgctcttgctttagttttttcttcaacaggctttcactgatgtacaggcagtcacaaatatctttcagcttccatgggtgcgccagcttcatgttgacaatatttctcacttttccggaaacggatagcacaccgttagttaatagtgtaatgaaacctttgcatgcggcaaaaatagacaggcaagaaaaaagcaaaagttctgaaaaattatgatgattgcgttcttccgagttgagataagcaatcatttcattaagcaatccagtcggtacatttgaagcacgtaaaaacttcgcaggaacaggcaccgtcactgtctggatgttagtgcattgtagatattttttaatggtattttcagtaaatccgatctctttaaaatgccgctcataaggttcaaaatgcgtacgaacagcgttatctaccatcaggatctcgccgtcagagaaggcgtaatctttatctaaaatgttagcgttgaaggcatgatgaataaatataacagaacaaacgagcgacattttatctccttaaaacaataaagtttttatcgatacttttttaacatttcatatttataatttgctgtttattttcagtcttgcaaactattgataatgaaatgtgtaagatctcttgcaatgcgacccatttctgaaatacccagctgatcaattgccgaaaaaatggctatcaacgtaagggtcagtaataagacaaccacaattacagacatgatttctttatagttgtctctttgcgtgattttgtttttcactgtggtcgcatgcatttcaaatatgtttatttagcggataacgttaaaaatcgttaatcagtatgcttaatataacaggctggagaaaagaggaaataggactggcacttcagtactgagcggagtttcttacagctgtaggcagaggtttatatcttatagtgtgtggtttaatttaatcaatgtgagcaaattgcgcgataatagtcaatgagaaattcttctgctgtgcggatgacagcagaagaaatgaggaggcgaattaatttgatggttctaattcaaccggaatacttttataaccaggaatgccacttaatggatcgtggttatcaagagttagcatgtgattcgattctggaaaataggtcaccagtgagcggtcagccatagggtaaatgaccacttttaatctatccatgcggcgtgagctgcgcttaccgtctggcgtaagcgcaataagattaactctttcgccgttttttacacggcaaattttagcttgtttagcactcataaagaccacatctcgttgaccgaatacccctcgatagcgatcatccataccataaatcgtcgtgttgtactgatcgtggctgcgtactgtcgccatgaccagcttactgttaaacgctgaagagggatcttctaacagccctttgctggtaatgaaattagccttacctgacggcgtcatccagcgcctttcagcagctgcatttatcaggtgaaaaccaccgggatgacggatgcgctggttatagtcggcgaactctggcagcacagcttcaatgtcattgcgaatgcgatcataatcttccaccagatactcccaggctaccacgctctggggtagtgttgcctgggcgattcccgcgaccacagcacactctgatttcagcattacaccggcgggttttaacacgccacgcgaggcatgaatcatcgacattgaatcctcaacggttaccgcctgcgcaccgcttttttgcatatcaatctcgctacgccccagaaccggcagaatatagctatgccgtgcggtcagcagatgagagcggttaagcttagtggctacgtgtaccgccaaatctaattgcgttaacggtacagcgctcgcttcccgatctggcattgccagtgcaaagttgccccccatgcagatcaatgctcgagcctgccccgtacatattgcttgcatgctggcaattgcagcatgtccaggtgcatgaggtggggtgaagccatagcgctcacccaggcgagccagaaactctgcagacggtttctcggtgataccgacggttcggtcgccctgtacattagagtgaccacgtagtgggcagatacccgcaccaggcttgccaatgttacctttcatcaacagcaaattgaccagttgctgtacgttctgggtaccatgttcgtgctgagtgatccccattccgtaacagataatggttcgttcggcagcggcatatgcatcagccagttcggcgatttgagtctgacttaatccagaaatacgttcgatatctttccactcggaattgagaacgtcacggcgtagctcgtcaaagccgacggtatgcgtttgaataaattcgtcatccagcaatgagggccgacctgcggcgcttgcagcatcatcgcgctcaattaacaggcgcatcatccccttgagcaacgccatatcaccaccaatgcgcacgttatagtaggcactggccaactgagtctcagagttcgtcagcatttcaaacgggttttgcggtgcagtaaatcgctccaggccacgttcctgtagaggattgatggcgatcattttcgctccccgtttcactaaagcgcgcaacgaagtcagcatgcgagggtggtttgtaccagggttatgcccaatgcaaatgactaaatcgcacttctcaaagtcttccagcaacacggtccctttacctacaccgatactcgctgccaaacccacgcttgtcggttcatggcacatgttggagcagtcgggaaagttattgctcccgtattcacgggcaaaaagctgataaagaaaggcagcttcattggaagtgcggcccgaagtatagaattcaacctgattgggatcactatagctttgaaggcgtgcgccaatttcatcgaaagcttgttgccagcttaatggcttgtaacagtcgctgacggcatcatatttcaaaggctgagtgagtcgccccgcagcctcaagctcgtggtctccccaggtaagtaatgattgaaccgtattctcagcaaagaaagaggcgtttacctgcttatccgtgacttcccaggcgattgcttttgcgccgttttcacaaatgtcgaatgacgcactgtgcttaggatctggccatgcacaacccggacagtcaaagccctctggcttattcatgtcaaacatggcaataacatcctggcgtatatccatctgcttacgtactgcattcgctacggatttaacagcaccccaaccaccggcagcaccctggtaggattcaatttttttcttcatctacttatcctgtgtggaaatgaattattaggatttgtaatagcgatgatgcacagtacatacaaagggattatcgccaacatggatatataagagtaggggactactctctttctatttttaatctattatcgttaaacaatagattaaatacgataaggtaagcatcatctctcatagtgtttaaattaacatattttttaatataaaaaataagactctggcttcaattgtgcgcggattttcttacaggtgtaggataatagctttcacaaaataattatccgcgcaattttcgtgaatggagcgcatagactaaggtcaaaatcacaattattcatagataaaagtgacaccaatgactgactggacggttccggctgaaactttgttccctgtttgtccataggttgcgcttaaacccagaggtactttgcttttatttactgtccccaaggagacattttctcccgtagccagtatttttccattacgcatcagagagacacccactcccgatgcttttgttgcatctggtgctgtgttagcaaacacttgtcgggcactgtcagtggtggcacccgaaagataaaatgagagcttttgttcgcttgagcaatatacgccaaggggtatttctgcgcttccaggaaagtccgggagatccacggtgacattacgactatcaacggtgcagccgcctgttggcataacaacattgttatttgaaataatattccacgtaaaattacgcggatttccgcttcctaatgttgcaattttatacatatgaatacgggcaatgacttcccccgcttttatgacaactccaccggccgccccaactggggtaatatagagttttaacggtaatggcatcggtgtcttatcaccaatatccaatacgttggtatttgtcgtcaacgggaaggggtaggtcacattattccagtacagcgatcctttatatgactgtagggagcctgcgaaagctgagccttgtaccaggtttatatgatcagtgtcgtaccagccgccgtaatcattccagcaacttatatgctgagacaagtctacaaccagattctggcccggctgtattacagggtcgagattaacataaacagaggttgtacctgctccaatacttgacccgccatcgacattacaactgaaggcaaaaactttgcctgccattaatagaagataaataccgaacaggacctttatactgattgttttacccatgatatatcctaaggttaaaaattgatttaaaaagaaggctaagaaaatcgaatcgacgttattgccaggtgtagatcacattgattagcgcctcgatcgttccctggcttgcgtttccattcaccgtgatagctcttgccttaagtggaaactgtgcattacgagtgatctcatcaacaataaccgttttgctatcgccattttttaacgtcgcatcctggtcatccctcagctctatctgaatattttcggcagtaccttcatttttgtaataacccgtattgtcagttgaacctgtcacgattgccgtcactgcacttgtttcaaccggacaatcggttaatgacaaagtaatattgtgccagccagatgcagaaccaggttgttgcagattgcgcgtataaagatccccgagattaacgttagcttctttggtttgaatagtgcagggtttagcgactacccgaccattaacagtgatagtgacatcgacggcctggagagttgctgtgaataacgcgcaaaacgtagctaacaggaacctcttgtgaagtcttttcatatctgactctgattattgaaattcaagggtaaaggttgccgaagccctcaccagtcccggattgacggacttctgagttgacttcagacgagcggagtaaggcaaaatattgttctgttctggtaccagtgggatccactgcatcccggcatgaaggtcattcagtttcaccggacgcatatttgcgtccaatatttctatacccaaaccggaggccgtattgcttccttcatccagtttcaacaaagtattattttctgcatcctcaataccgttaaatgcaacccgaaccccccgttgtccctttgctgcattcacttaacgtaatctgaaaagggacgactggacttgtgctaccggtcgttggaaattgtctggcactgtttttttggagatctacggtaaaattaagcgaatccgatgagactgtgcagccataatcgaggacgcgcccgctaattttaataacgctatctgcggataaagcagaataggtggttaaccccagacataaaccgaggaaaataatgttattgtatttcataatctattgttccttagcgacagattgctgtctgctggttcagtaaggtaccaggagaaacttcaggaagcttgtactcgacaatacagtttgagtttttatctttgccccatgaaacctgtaatttccctgactgtggaagtccagtcagataaacctgaccgttttctgcgacaatgctgccatttttattctctccgtgtgtgacaattgcaccgaatggaacgctcttattaccgtacttcaacgtcattaatactttcccgccgatttgtgcattaaatgttgctctggcaatagcaccgtgagttgggatgacagtgaccacggtttcatccagttcaacattatctgcaagggaattcgcgttaagagcaacacggttttctctatattctgtcgcaaatggtaatatggcatagccacgccagtcggtatgaattccggtctggttctctattttgacattatcagcgccaggagccttaaccagaaccattgtgtcgcccagcggctgtccaaaggtgatgccatcagcatgagcaataatcccaccactcattccgtaataaatctggctgctgtcaccattccgactgtaaccgacattcgtattaccgtaagctccacgataattaagagaactgtaaccactggtgccagacgatgtattacctccgtgggtgttaccgacctgaacgctataattcaggttattatccggcagcagagtgccataaacccccgatagattggtcatgccgcctttcaaatcgtttgacatactgtaactggcgtttgaattacgaaatgccgactgactgtctgtacgcatccaatgactgaagggaacattaagcgtaaaagcgagtaaatgatcccgatcgttttgccatatattattggaatagctgtaattcagcgaagtcgtaatatcaccaaacggcacatttaatccaaatgatatttgctggtcgctgcgtgacgtgttccagtaactttggcgactggcactgaaaaatgtcgtaccgtaatttccaagctgctgagagatgcttatttgttcctgaccacgcttactgtagaacagattaaaataatcaataaattgtgtctgctcattggtgtctccggtaggaggcttgacggtgtaaccactcattcgactgtaggcactgtcggataagttataaaaaccttgcgtagaatagcgatatcctgcgacctggatattggttcctgtctggtagaaggatttgctgtagacggatttaaccgattgcccgctgtgacgggtgccatctgcaagtgtcgtattggcctgcgtgatatcgaaagaaaaggcaccaaaaagtcctaaatctttaccaataccaaggttgaaggcctgataatcttctgcaatttgcattccgccataaggtgtccagtttccttccagtccatgcatcaagctaccttgtatgaacttgggggagctttgcaggttatttccactacgatattcccccatggcaagcgcataacgcgtatatccagcacgttggagaaccggaacagacgaataaggaacatataatgtctgaatactgccgtctgcctcttttatggttacttgcagatcaccaccattggcggcagagttgatatcatcaatagtaaaagggccgggtggaacagtagtctgataaacatcgtatccgttctgttttacactcacttgtgcggtgccacgggcaataccatgaatcaccggagcgaaaccatgttggctatcgggcaacatcgcttctgttgaatttattttgaggccacgaaagttcacactatcaaaaatatcgccatcggtataactatcacctaccgttaaccgtgagcgtaagggaataatgtcacgttcagccgacgtattgatatgctgccatttattgctgttagatgaattgctactcccactgttataactccacgttgagttatcgcgcagtcgccaactaccaatgttgatgccactctgtaaattcaaatatgcatagttggattttcctgcattatggttactacgattattaatggaattaccattaaaactataatttagaagcccagcatttattccttcttcccacagttcaggagaaacatagccgcgagccattctgccaacataaatttgcggaacggagagtgacaaatgttgctgaccaacatcaaactcagttgatgcgtcggccaaacgatcctgaagtggtgtgcatgcgctgttgtccggcacatgtttttctgccgaatgttctttattgtctaataactctgattttttataccaagactgacaagaagatctgtactaagtcattctgttattgcttaaaaacaagaatcattcttgattggttgttgccctgagaatatagtttccagggtt

SEQ ID NO: 557 - DNA, 49167 bp, Escherichia coli
ataactctgattttttataccaagactgacaagaagatctgtaactaagtcattctgttattgcttaaaaacaagaatcattcttgattggttgttgccctgagaatatagtttccagggttattacatttcacgaagaacgataatatctttaaatcacaaggacacctaatcacaacaagtttattgctgcacttgttgaagagagtatttgcaaaaacattttatgtcgctaaataacatgacgatttcattatgcatgttatttataaaccgtgactaaacagaatattattgcgaacaagggaagtgtcaggaaaggtcaagtgctaccaatggttaatatggctataaatcattagctatggttaatgtttgcttgctgaaactaacaccgaattgctctaaacagataagtgcagggtttattaaagctgaccgacagactttcttaacctggtaatatctctcttgggtgactctccaaacatccgcgaatattcccgactgaaatgggatagctttcataaccgacagcataggctgctgtggtgacatcgtaatgttcattcagcatcggtcgcctgacttcattgagacgtagccatttctgataccggagtggactcattcccgcttgatccgtccttaaataagtaacagcaccctctggtgttttcgtatgcagtgtctatgcgacagacactgcgctcttagcatggggcagggaataaccaggctatttctccatgcacaggccaattatgaaagaggagaggcttaagttcttgaaccctgaacgaataacgactaccagaaaagcacttcgcatcactcagacatgatttaacataatatacattatgcgcaccagtataaaccaaggaagaatccagtcgttggcggtcatgattgtcgtgctcattaacaacgaccaaaccccatatctcacttactaccgtattctcggcttaaccgtccatgcaacctcaacacattggtttcaactgccgtcaccacgttctccggaaaatctgtcggtaatgaagtcttcacgttatccagtgctgccggaatcattctggcaaagtcacttaggatttcatgcatctgcacttccgggaatctcagcacctttgctgtcgccaaaaaatgtcgcggataaattttatcgattgccgtttttttgcctttggatgcgttaagccccattgccagtttgagatcgctgatgtgtattcccgtaccgccaaggaccggaaatgctgaaatgatgtcgtaaaatggcgtgagtcgataactgccgccagcctgaataaatacggagaagttttttgcatggccatccgttgcgccaatcaaccactggaagacctggaatttcataaaatcataacgatcgcgaagcgcctcgctggaccccatcaaaaacgccatgatccgcgcgatgcctgggcctccatctgattcatatttcacagatgaaggtaaaccgaatgtctgacacatatcctcctgtggcaagcgaagtaaaaccgttcgctcagtattccaacgcctgtcaaaacgttcgaccgctaacgcgcgcacccttcccgctttaatgatttctgcgtccggaacattcaacccaagttctttcgccagcagcagacagtaatactcattatcaacgctttggctgagatcgagcgtcgcattgggctgcctgatttcgccaatcggtaatttaatgatgtgcgtcgtcggcgttattcctttcggaatgcaccagtcattgcctattctaagcagcgctgtcttctcctgcgcgccagcaaccgagatgcgaaagtcattttcttctctaatcatgcccagagggatatctgctttataagccgttaatacttcttcaagcctggcttcagtaagcttttcccatgccattatcgggcgcgttatggtttcattttcgggtaataacgttacggcaccaacgctgtctcgccctatttctgacaataaatcaaacggttgtctggatttagcatgataacgtttaacgatccggtcacgtacaatcgggctatcgggtaacaggttatcgaagaagttaaatacggcatctgaggtgatattccccctctgcaatggcagcgaaagtgacaacggtctggcataacggctggctaaccactccggtgcatacttaaaggtgtgcgcgccgttggctaacttcgttaactcgcctacccgctggttgttcatccaagtgacaagtttaggcattaccactccagatcttgctgttctgttgattctggcgaggcatttttcgtgtcgcatagtgtcattgagagttcaagcgactgtaaaatcttaaaaaatgtcgtgagcgtggtattgtcagggttgttttcgaaattggaaattgtcgcctgcttaatgccaatttttttcgccagctcgctctgcgtccagccattttgctggcgaaccagtttcattgcattcgctaattgcgttgggctatagatcttctgaaagctcatcatgtcatacgtccacagcaaatttatccgcttaaggggatattatcagttttatcctttagtgaggataaagtcaatctggaaacacatcttatccgctgtacgggataaacgctgcgatatccgcgatcgcggataaaagggaggctttaaagcctttgaagtcggcaatattaagccgcatgccatctcgacatgcggcttatacggtttaccagctatatttcactcccagcatgccctgagtatcgctatagcctttatcacctagttgcacaccgacattcccccacaggctaaggttgttatttactttcgcctcaaccccggtacgtacttcaccgagattacgcgcaccttcacggcctacggtttgaccattcatcttcacggcgtagactttgctattgttgatccagttcgcttcaatgtaaggctggaactcacgctgtttaccatcgtcacgctggtgatggctattcaggtaggttttcaccccaagtcgcgtttgcacatttccgtcgccttccgtttcaatgcgcgttccgtctttccgggtatggtcggaatctttcacacccatccaggtgatttgcgcctgtggctggacgtaccaggtattcagcgtcccttcgctgccgctaaatgttcccgcttcaaaggtatacccaccctcaacagaggccgtcacaccgcgagaatcatagtcgtcagcagaacggttatcggaactgacgctgttatcaaaccagttatacagcgcccagctgtcaacataagcgccggtcttattcgcatcgttctgataccaggtcgcgtacagcccagcgctgtaaccgctgatgcgcccatccgatttataacccacacgattactctgagtattactgtgctgattggcgtagcctgccatcacgccaagatgccagcgatcctgcgcgttgctactccactgcgccaaatcgccgcctagctgcaatacatagcggttagcctgagtatttagctgaccgtcaccggcccttgaacgttcgtgccctccgacatgacgcatccacatactgcttgccgacccctgagaatgcagtgaatctgtatactgcggctcacccagacggtcgtgtaaacgatggctaaacagcgagttggctgcggcaatgttgctgatatagcttccggcctccgggcgataaactgatgggccttccggatccacaacagggggattattgatgggatcgggtgtatccgctggcgttacgccgtcccatttactggtcagataccagtttttctcgtcattccccttccctttagccagcgtgtagacgtaagccccagcttcgacagttccggtggtcagcgcgaagttacctgcagaattaccgccaacctcaatgagttcaataccgttgaccgtttgtgcaccgacgccgccaatgttatcaacccgaacgcgagtgttcccttgggtatcgcctttcacgttcatcttatcggtgggcgaattatcgccgcccagcgtcgcgttgaacgtcatcaggccattgtttccggtatagttgccgttaacggtcagtacattccccggtttccccccttcgctattcatttgaaccgtgccgccattctccaggttgccgccgatagtggttttagcgacacgcagtgccccccccaggcataacgttcatatcatctgcagtggtgacatttcccgacatcacaccgctgttatggatattaatgtgttgacttgccatattaatggcagagtcggaaccgaaagcaatttccccccccacgatatccgtcgtaccctgatacgccgcggaatcgttgttaagagtcaggatcccggtacccagttttgtcacatcaccgctaccgctgatactgtgcgtcatcgcccagctacgctcagtggagatggtgagcaggccattattgataacggaagcatcacccaggtttttctgctcgttgacgctgagcgcgctgcctgtatcaatgttgaattgccccacaaagcggctattatcgccatccagctctacatctgtcctggcggttgcgctcacgatacccttcccgcttatgctattgcgcagttcgccagtcacgttttttagcgttaacagaccgtcattggcaatatttcctctgcctaacccctgagtattatcgaggctgacttccgcatttgggctaatgctggttaacgcattgtagcgtgcattaagcccctcgatagccagcgttccccctgtaacattcaggtttccgccacctgtcagttcaccctgactgatcccacctttatttaccgtcagcgccccctctttgaacaaaacagtcgaacccatctgcccggtgaatgtctctaccgtctgcgtcgatccattaagatcgacgatggccgcgttgctgatgttcagttcccgggtgttgccaagtgcaccatccgcatcggtacgtaatgtccccatctgaacgtaggttgccccctgatagtcgttctgaccgttggaaagcgaaacctgtcgcaccgtattgattgccagatccccttcaccaccgatttttgccgacatatcggccgttgcgccataggctccgccatgttcggctaacgtcagcttttgcccaccatggatgttcagcgctttcagcccatagttaacgtacaaaccatcacctggtgcggtcgtgaggcggaatccataatcaccctcggcgaccaccgttccgttttgcgcaatgtgtaacgttttgtccgcttccacctcgtcgccctgtaaatcacgtaacgttaatgagccacccgacccaataaccgtttgcgccttcaccagttgaacgccgacatggctatcgtcgtgttccagcaaattgagcgtcgtcagagggttattcgccatgggatcattccacggtttaggcacgtcgataagcacgtcgcccgtcccgtttacctgatagttacggcctttccaggtgtagtcacccgcgccgacaaccagcgtatcgacgctgatatatccctctgcaagcgtcgcagcaggaatatccgtatcgaaaatgagcgtaccgccattcatggccagtccaccaatggattgctctcccacttttaccgatgtggtattttcactgtcagactgcaacatcgcgtgagtaagcgcagcggtgttgtcgcgttccagagtgaaggtactgtctttcagttgggcaacaccggcgaattcagtccctgttgcatgggtaaagccaaacatcttgtcggaggatgacagctgcactcgcatcaaaccatcgcctttgagcgcattggtcagcgtgtaatctcctgcactgttcgttgatgcgagaatgtcgagcgtaccggggcttgcaatggtgacttcactcgaacccatgcccgttaccccatctgccgtatgagacgcaatggtcaggaggccgtcattgaccagcgttttaccgctataagtattccctgcattgaacaccgtatggcctgcatcatggatcacttttccgtctttatcgtcacccgtaatcagcatatcgacctggtagccggcatcactgttattggtatgattaaagacaaaaacgccttcgccaagaccaaactccactttcgtcgcattggtgataaatccggcatctgccgccgcctcaccgtgagcagcaccaatgtttagcgttcctacagcaggctcaaaaacacctaagtaaacttctccaccttcgacattcagcgtaccgttattcgtcagggttaacgtacccgtaccagatgtccctacgtacatattgaatgtttcaagaagagagttctgcccatccaccctcacgtcgcccttacttttgtcattgagagctatctgtgtatcacgcgctttaactatacctccggtggtaatattcagttcacccgtgcctaatacaccgacctgtagcaattgtgcgttagtagatgatgtctttaaattccagagactgtccgttgaaatattaactatccccttaccggaggcatttcctccgataaatccatagcccgttgaattaagggtggcaccattactgacatttacgataccgctaccaaaattaccgacattgatacccacagtatcgaacgatgatgtcgcatccatcaggttcagtgtgccgataccgcttgctttatcgcccaaaaaagtaatattttgcgatacgaacttaccgccatcgctaatattgaggtttccgacgcccgcaacaccaatggtggtatagacattcttattgacctcccacatcccccccgtggtgatgctgacattcccgacgccggtttctccataaccgagtgagcttcctccgttgctgacaacaagcccctcattactgatatccatttcgccgtggccgtcataaccaagattagttccgagattagtgataacggagttcttatccttaacagtaatgttgcctgtgcctgtttctttcatccccgcagtgataattcccgaatctactttaccttcacgcgagacattaagttcaccgtcgccagcatcaccgatatagatatagcggaaagcttcgcctgttccgaggaaattccaatgccctttatcggtcacgttgatgacaccgtgggaaccgtcctgaacgcccaccaatgaatattctttgttattaatcagtccattattggaaatattgactgtgccatttccgaaatatccattatagagtctgcgtaccgtgatgacagagtcttgctcctgcacattcagggctccgaaaccggtggcattgccaccgataatcgtgttttcagccgtaatcagcccaccctcgcgaatagtcgcttcccccgctccttgattaccaatttgaaattcaattgaggaatcgttattttttattagccactcaccgcccttttcaacgacaacttggccattactgcccgcctgatagcctaaaatggcgactattgaactcgtgacgtaacccttatccgtaatatttaatgagcctgtgccatagctccctatttcgaataattcggtcgtcagaacagagtcctctccctcaacattgaccgtcccgacgcctcctgtcgaggaacctagccttaaatatcctccatcaacgtgacctttctgtttaatattcagcgtccccgttccggattgacccacatttaaaggccttgcattatttccgctatcatacaatcgccaggtgccacccaaaacattaacggtgcccttcgagttctcattaccaccaatgacgctggtagtaatcgtggttaaggaggcattaccgccagccaaaatattaagcactccagtgccataccagccaaccaggtaggcatcataagcaacatcagtatcaatattggtaatctgatcattatcaacttccagactcgcaccagacgctgaaccgcttagtgccagcaaaacacccagcgtcaatctactgaatttcgttgtcagtccagaggatttacgcaaattaaccgtcgattttttacctaccctgcgagttaattccgagcagacctgaaatacctgtagggtgcaattccatatcacgcgatagattctattcatataaacgctccatatacaaacaatacagccacgaaagagatgagtcgccagacattaaaaatgaaacttattaaattgtcagaggtctgtattgagtgttagttggaggtgggaaggtgtcaatttggctaatttgctaatgctttcgaattgatagattaaaaattgcatagttcttattttatttaaaaatgaactatgagttattgttgcttaataagaaaactgtttctttcaataagaaaattatcatcatcatatttaacaaagaatagcactaattgctaaaaatcgaagtttattaaaccccttttgcatccattagtgtctttaggaatattcgttataaaataagcattatgcttaatgctttaagaaaaatagcaatttccccttgaatatattactggtgatggaaggatgaatctgcaagctggcatttaacaagccagttctaaaagaagggaaataagaataactatactcaaaaactaacagccacggtcatcatgatgtggctgtcaatgaaactataacccaggcgctttccataacgacgtcgtcagtccatgatcaaccagccccagctgatcctgataaactgcctgccacttatcgcgtgaatcctgataaagttcatgcttttccgggtctggtgtgtgcgtccgttcccagcgaaccaggcgttctccggtttctgccattgatgaaaaaattccggcaccgacgccagctgcaatggcacatcctaatgcagtggcttctttgaccaccggaatattgacgggtaatcccgagacatcagcgagaatttgactccataatttcccttttgaacctccgcctgcaaagactaacgatgaaggatgaatattcgagaaatcagcaatttgctgcaagttacacgctgatacaatcgccgcattttcttccagcgcacggaacaatgtcgctttgttacatttatccgggtcaatggacaagttaataaaggaaggcgcagcgtgataccaggttttaaagcgcattctgtcggagaatatcggcattacgccccacgacccaggcggcacccggctggccatctcttccaacagcgtataggtgtcgatgcctagacgttcggcaatcagtttttcttcggcacagaaagcatcgcggaaccagcgcatggtgagtccggtaaaaaagcttatagattcagcttgtaccatgccaggaataacatggggattaacgcgcacgttcatttctggatcggtcaccggcgcggctaagtttacaacttgctgccagaatgtgccgccaagaacagcggtttgtgccggacgcacaacgcctaaccccaggcaaccaagctgcacgtcacctcctccaacgaccaccggagtgcccgccttcagaccgcagagttccgccgcttgtgaactcaccacacccagcaatgtgccggtttctttgacaggagaaagaatatcggcacgcaggccagccatatccagcaatgcaggtttccagtcacgggtggttagatcaagaagtcccgtggtgccagcgttagagggatccaccgcaagttcgccgctgagcatataggccagccagtcgctgatcatggtgatggttgatgcctgacggtaaatatcggaacgatggtgcgccagccaaagtaatctggggatggcacttaaagccagtgtttgtccggtcgcgcgataaacttcgttttcaaaggtattgttgtgcagttctttaagttcgctaacttcgcgcgccgctctggcatccacattggcgcaggcccagatcggtgttccttcattgttatataaaacaatgccttcacgcatcgaacatgccgaaacggcagcgatatactccggggctatgccggcgttgtgcaacgcctggcgcatacactcacacgccagttgccagtttttgttgagatcaaattccatagaaccaggaacgtccggtactgccagatgccgccactccgcctgtcccactgctatttgattgccttccaggtcgaatatcacagcccgaatacttccggtgcctgcatccagcgccatcaggtagtactttgattctgaaggggtaaagagtcgagccattagattatcctcggcttatgcgttctgtctgttcctctatacgttctccatcattcccggtaataaggtcatgcaaatttaactacgtaaaatcgccgctgctgtgtcctgatcggtaaccagtgcgttgatataaccgcctttcattgcagcggcaattgcttcggctttattttctccccctgccacgccaacccggacgggtatggtcttcagcgcgcttaaaggtaagccaatcagttcgttatgtattttgatatccgtgacaacgtcacctttcgcatcaaaaaagtagcctaaaatgtcgccaaccgccccttttcggccaatcattaactgttcgccttggctgatataaccggagcgaatgattgtcgcgtcgtcttgttgactcacggccccaatgccgacaatcgccacatccgctgcttgcgcggctaacagaacatctttgacgcaattttcattttttagcgtacgagcaatgtcagcggaggatgcccgcaacggggccggaataatattcacactgcacgccgcgttaagctgtccgatacccgtcatataagaaccgacgccaccggagagcgtgaccaggcgaatttgctgtgacgaaataaaaccacttaagcgttgcagcgtattcatggttgcctcgccaaaaccaatcgccagcatctgttgtggttgaagtaaactcatcaacatatgcgccgcgcctatccctagtcgcccgccgacatcagcatccgcaagccctgggatcacccggacatgttgcagcgaaaactgacgacgtaattgtgtttcatattccagacagccttcaaagcgagaattaatctgtacgcgaataatgccggattgatgccctttctccagtaatcgcgacactttcaaacgggtcaggccgagacgatcgctgatctcactctgggtcagcccgtcgtgatagtaaaaccacgcgatccgcgcgacctgttcttcttcacacattccctgttctgaaattaccgaatcgttgattgtcataattcattcttcactttgaacatacttaaatctttaatgcaattgttcagttcttgcgcatttatatctgtgatggcaaccacagtttgactctacgagcatgaacaaacgcaaccgtgaaaatcaaaatagcataaattgtgatctattcgtcggaaatatgtgcaatgtccacctaaggttatgaacaaattaaaagcagaaatacatttgttcaaaactcacctgcaaaactgaacgggggaaatatgcaaacgagtgatacccgcgccttaccgctactttgcgcccgctcggtttataaacagtattcaggggttaatgtcctgaaaggcatcgattttacgttgcatcagggggaggtccacgccctgctcggcggcaatggtgccggtaaatcgacgttaatgaagattattgccggtattacccctgctgatagcggtacgctggagattgggggcaataattacaccagattaacgccagttcatgctcatcagttgggcatttatctcgttccccaggaaccgctgctttttccaagcctgtcgataaaagaaaacattctgtttgggctggcaaaaaaacaactctccatacagaaaatgaataacttgctggcggcgctgggctgccagtttgatctgcatagtctggcaggatcgctggatgttgccgatcgccaaatggtggaaatcctccgcggcctgatgcgcgactcgcggattctgatcctcgatgaacctacagcctcgcttacccctgccgaaaccgaacgcttgtttcgtcgcttgcaagagctgcttgctactggcgtgggtattgtttttatctcgcataagctgccggaaattcgccagattgccgatcgaattagcgtgatgcgcgacggaaccatcgccttaagcggcaaaaccagcgaactgtctaccgatgacattattcaggccattacgccagcgatacgggaaaaatcgctctctgccagccaaaaattatggctggaattacctggcaaccgcccacaacatgccgccggaacgccggtgctgacactggaatatctgaccggcgaaggtttcaggaatgtcagcctgacgctcaatgccggagaaattctgggcctggctgggctggtgggagccggacgcacagaactggccgagacgctctatggtctgcgtactttgcgtggcggaagcattatgctgaatggtaaagagatcaatagattatccaccggagaacgtttactgcgcggtctggtttatctgccggaagatcgccagtcatccggactgaatctcgatgcttcactggcgtggaacgtctgcgcccttactcataaccttcgtggattctgggcgaaaaccgcgaaagataatgccaccctggaacgatatcgtcgggcgctgaatattaaatttaaccaaccggaacaagctgcacggacattatccggtggcaaccagcaaaaaatcctgattgccaaatgcctggaagcctcgccgcaagtattgattgtcgatgagccgacgcgcggcgtggatgtctcggcgcgtaatgatatctaccaactgttgcgcagcatcgccgcacagaatgtggctgtgctgcttatctcctctgatctcgaagagatcgaactgatggcagatcgtgtgtatgtgatgcatcagggcgaaattacccactctgcactgaccgggcgcgatattaatgtcgagaccattatgcgcgttgccttcggcgatagtcagcgtcaggaggcgtcatgctgaagtttattcagaacaaccgtgaaatcacggcactgctggcggtggtgctgctgtttgtattacccggttttctcgaccgccagtatttaagtgtgcaaacgctgaccatggtttatagcagcgcgcaaatcctgatcctgctggcaatgggcgcgacgctggtaatgcttacgcgcaatattgatgtttcagtgggttcgattaccggaatgtgcgcggtgctgttggggatgttactgaacgcggggtattcactacctgttgcttgtgtcgcgactttactgcttggtttgctcgcgggatttttcaacggtgtcctggtcgcgtggctaaagatccctgccattgttgccactcttggcacgttagggttgtacagaggcatcatgttgctgtggactggcggtaaatggattgagggattacccgccgaactgaaacaactctccgccccgctgctgtttggcgtttccgcgattggttggttgacgataattctggtggcatttatggcctggctgctggcaaagacggcgtttggacgcagtttttatgccacgggcgataatttacagggcgctcgtcaactgggcgtccgtacggaagccattcgcattgtggctttttcgttgaacggttgcatggcggcactggcgggaattgtgtttgcttcgcagattggttttatccccaaccagaccggtaccgggctggagatgaaagcaattgcagcctgcgtgctgggcggcattagtttgctcggcggttccggtgcgatcatcggtgcggtactcggcgcatggttcctgacgcagatcgatagcgtactggtgctgttgcgcattccggcatggtggaacgattttatcgcgggcctcgtgctgctagcggtgctggtgtttgatggacgcctgcgttgtgcactggaacgtaatctgcggcggcaaaaatatgcccgctttatgacgccaccgccatccgttaaacccgcttcgtcaggtaaaaaacgggaggccgcataatgcgtattcgctacggttgggaactggctcttgccgcactgctcgttattgagattgtcgcatttggtgcaattaacccgcggatgttagatctcaatatgttgctgttcagcaccagtgactttatctgcattggcattgtcgccctaccgctgacgatggtgattgtcagtggcgggatcgatatttcgtttggttcgaccatcggcctctgcgccattgcattgggcgtactgtttcaaagtggtgtgccgatgccgctggcgatactcctgaccttactgctcggcgcattgtgcgggctgatcaacgccggattaattatctataccaaagttaacccgctggtgattacgcttggcacgctgtatctgtttgctggaagcgctctgctgctttccgggatggccggagcgacggggtacgaaggtattggtggattcccgatggcgtttacagatttcgctaacctggatgtgctgggactccccgttccgttgattatcttcctgatatgtctcctcgttttctggctctggctgcataaaacccatgccggacgtaatgtgtttttgattgggcaaagcccgcgcgtggcgctttatagcgcgattccagttaaccgcaccttatgtgcgctctatgccatgacggggctggcgtctgcggtcgccgctgtgctgctggtatcgtattttggttcagcacgttccgatctcggtgcgtcgtttctgatgcccgccatcaccgccgtggtgcttggcggtgccaatatttatggtggttccggttccattatcggcaccgccattgcggttttattagtgggatatttgcaacaaggtttgcaaatggcaggagtgccaaatcaggtgtccagcgccctttccggtgcgctacttatcgtcgttgtcgtaggtcgttccgttagcctgcatcgccagcaaattaaagagtggctggcgcgtcgggccaataacccattgccataaaggatatcttcatgacacttcatcgctttaagaaaatcgccttacttagcgctcttggcattgccgcaatctctatgaatgtgcaggccgcagagcgtattgcatttattcccaaactggttggcgtgggattttttaccagcggtggcaacggcgcacaacaagcgggtaaagagctgggcgttgatgtgacctacgacgggccgacagaacccagtgtttctggtcaggtacagttgattaataacttcgtcaatcaaggttataacgccattatcgtttctgcggtttcgcctgatggcttgtgtccggcactgaaacgcgccatgcaacgtggtgtgagagtgctgacctgggactctgatactaaaccggagtgccgctcttactacattaatcagggaacgcccgcccagttgggaggtatattggtggatatggcggcgcgtcaggtgaataaagacaaagccaaagtcgcgtttttctactcaagccccaccgttacggaccaaaaccagtgggtgaaagaagcgaaagcgaaaatcgccaaagagcatcctggctgggaaattgtcactacgcagtttggctataacgatgccactaaatcattacaaaccgcagaaggaatattaaaagcgtatagcgatctcgacgccattatcgcccccgacgccaacgccctgcccgctgccgcacaagccgcagaaaacctgaaaaatgacaaagttgcgattgtcggattcagtacgccaaacgtgatgcgtccatatgtggaacgcggcacggtgaaagaatttggcctgtgggatgtggttcagcaaggcaaaatttcagtgtatgtcgcggatgcattattgaaaaaaggatcaatgaaaacgggcgacaagctggatatccagggcgtaggtcaggtggaagtctcgccaaacagcgttcagggctatgactacgaagcggatggtaatggcatcgtactgttaccggagcgcgtgatattcaacaaagagaatatcggcaaatacgatttctgatgtgcattacttaaccggagtaagttatggcagatttagacgatattaaagatggtaaagattttcgtaccgatcaaccgcaacaaaatatcccttttatcctgaaaggttgcggtgcgctggattggggaatgcagtcacgcttatcgcggatatttaatccgaaaacgggtaaaaccgtgatgctggcctttgaccatggttattttcaggggccgactaccggacttgaacgcattgatataaatatcgccccgctgtttgaacatgccgatgtattaatgtgtacgcgcggcattttgcgcagcgtagttcccccggcgaccaataagccggtggtactgcgggcgtcaggtgcgaactctattctggcggaattaagtaatgaagccgtggcgttatcgatggatgatgccgtgcgcctgaacagttgcgcggtggcggcgcaggtttatatcggcagcgaatatgaacatcagtcgatcaaaaatattattcagctggttgatgccggaatgaaagtgggaatgccgaccatggccgtgactggcgtgggcaaagatatggtgcgcgatcagcgttatttctcgctcgcgactcgaatcgccgctgaaatgggggcgcaaattatcaaaacctattatgtcgaaaaaggttttgaacggattgttgccggatgtccggtacccattgttattgctggcggtaaaaaattaccggagcgcgaggcgctggaaatgtgctggcaggctatcgatcagggcgcttctggtgtggatatggggcgtaatattttccagtctgaccatccggtggcgatgatgaaagccgtacaggcggtggttcaccataacgaaacggctgatcgggcatatgaactctatctgagtgaaaaacagtaactgcggatttaaggagaagaattatgcacgtcacactggttgaaattaacgttcatgaagacaaggttgacgaatttatcgaagtttttcgccagaaccacctgggctctgtacaggaagaaggtaatttgcgcttcgatgtcttacaggacccggaagtgaattcgcgcttttatatttacgaagcctataaagatgaagacgcagtggcattccataaaaccacgcctcactacaaaacctgtgtcgcgaaactggaatctttaatgaccgggccgcgtaaaaaacgtctgttcaatgggttgatgccgtgaggcgaattcatcagttttatctacaattggggtaacgcgctgacgggagtaaataaatgtctgactggaacccctctttatatctgcactttgccgctgaacgatcgcgtccggcggtggagctgcttgccagagtaccgctggagaatatcgaatacgttgccgatcttggctgtggcccaggtaacagcaccgcccttctaaaccaacgttggcctgctgccaggataacaggcatcgactcgtctccggcgatgattgctgaagcgcgcagtgctttgccagactgccagttcgtggaagcagacatccgcaactggcaaccggaacaggcactcgatctgatttttgctaatgcctcactgcaatggctgcccgaccactacgaattgtttcctcacttggtttctttacttaatccgcagggcgtgctggcagtacagatgccagataactggctggagccgactcatgtgctcatgcgcgaagttgcctgggaacaaaactacccggatcgcgggcgtgagtcgttggctggcattcatgcttactacgatattttgagcgaagccggatgtgaggtcgatatctggcgaaccacttactatcaccagatgccgtcgcaccaggcgattatcgattgggtgaccgccactggattacgtccgtggttacaggatctggccgagagcgaacagcagctttttcttacgcgctaccatcagatgctggaagagcagtatccactgcaagagaacggacagatactgctggcatttccgcgtctgtttattgttgcccgccgtacggagtaattatcacgtcagctggtaatgacgatcgggaagaatttttgctggaatttcggcttcatcgttcatctgtaacaggtcaatttcaatagcgttgcagatggcatccagcggtaaatcattgttttcagtaccgaacggatcttccaattcttccgccagacaatccagcgaaataaaagtgtaggaaatcagcacagagataaaaggcgtcatgtaatgcaggtccacgaccagcgcgaacggcagcatgatacaaaacagataaacggtacgatgcaaaatcagggtgtaggcaaagggaattggcgtgtaggcaatgcgctcacagcctgccagaaccgctgaaatatcattaagccgatcgttgaggctaataaacaggatatctgaaagctgcccattgcggcgctgaaccgccaaccactcccccattattaacaagatacggttagctggagagttcgaagccagtacaggctgaagatcttcagtcttgagataatgagccagcacttccgcctgtggctgtttgcgtaatgtcatgcgtaaacagtgggcgaaggcgatttgcaaccgggcaaactcccttacacttgccgaatccggcaatgtcgtttttacctcgcgcagtaacgaccgtgaggcaatcatcaactgcccccaaagttttcgcgcttcaacgtaacgggcgtacccggcattattacgaaaaccaagaaaaatggcgatggcgacaccgagaatgctgaacggtgcgagggtgaatttgatgcccagatgcgtgtaccagggcagcatgaaaataacagcgatagaaaagagaaaattgagtagtaagcgcgatgatatcttggataatactgagccgtgccagacaaaaatacggcgcagccagtgttgttgtggacgaacaatcatggttatcttcaggcgtgaaaaagtcgccctattaaacgtgattacgatcacattctcaagacgctacttacaaattacctacaagcttacaacattaacaggcgctgcatgtggcatctgttaatgataaaggcacataggatgttgtaactaatatagtgaaataagaaacccggtcgaaaccgggttcagaagtaacggtgttattagcacaacggacgtacagcttcgcgcatccctttttcaagaatcgcatccaggtcattagcaacctgctcgaccagaccaggcacttgcgtcaggtcctgctcccagtggtctttttctgccaaaacaatcgctaccagttcctgggtgccgataacacggtcacgatgctggctccagagttgctgataacgttccagccagtgtgcatcgtcctgtaccggatatgtttctccgttacgctcaccgcgatagaaggcaatcaaagccgctaatgcgaaagtaaggcgcgccggaagtgtgccttttgccttctgccctgccagcagctgcggcaggatgcgagtgcggaacttggtcataccgttgagcgcgatagacagcagctgatgcttaatgtacgggttacggaaacgcccggtgactgcactggcgaaagattccagttcatcacgaggcaaatccagtaccggaataatttcttcgtagatagctttttcaacgaatgcgcaaatttcagcatcgttcatcgcttcacctacggtatccagccctgcctggaacgccaccggcaccagcgcggtgtgcgcaccgttgaggattgccactttgcgttctttgtacggtttaatatcgtcaacaatcagcacgttgagcggatatttgtccagacgcagttcagtcgctaaggatttcggtccctgaatcacaaacaggtaaaagtgttcagcggtgtcgagaaaaccatcgtgataacccagttcttcttccagtttagccacttcatcgcgcggataaccggtaacgatacggtccaccagcgtagaacagaagctgttagcctgatccagccattgaataaatgcttctggcagtgcccactcttgcgcatagcgcagcaccagttcacgcaacgcgtcgccattgtagtcaatcaactcacacggaatgatgatccaacctttatccagcgcaccgttgaaatggctaaagcgttcgaacagcagacgggtcagttttgccggatagcttaccgctggcgcgtcatcgaatttatcgcccgcatggtagctgatacccgcttcggtggtgttagagaaaacaaagcgcatttccgggttgtgcgccagtttcaggaattcatcgtattcactgtagacgctgatttcacgattaaccgagcgaatcagacgcgcgtcgctgaccgcttcccccttctcattcaggccacggataatggtggtgtacagaccatcctgcgtgctcagtgacggcgggaatgaagtttcaatcggacgaacaacgaccacaccagaattcagatcggtgtgctcattcaggagatcgatttgccagtcaacaaaggcgcgcaggaagttaccttcaccaaactgaatgatacgttctggatactgtgcaccgggaaaatcgcgacgatttagtgttttcacaatgggttcccttctgattagtcatacaacctgtttgaattggtacgacaggttagcaaactttaatacgccgaacccctgttttgatcaactcctgatgattaatgagcagttttatgagaaaagtgtggcgcggatcatggtttaatcgaggaaatacgccttttcctggatcataaagtggtagaacacattgcattcaaatcgcgcggaatgaataaagatgtcagacaacttcctcaccgtaacgcatagtgctggtacggttgcgcccatctttcttcgagcgatacagacacgtatcggcttcgaccatcaatttattaaaatcatcggtcagcgttcggtacgatgcgcgaccactaccgacgccaatacttaccgtgagataaagcgttttttgttgccaggtgaatggttgcagttcaacgcctttacggattttttccgccattagcagaccatcgacaggattcaccgacggcactgcaacagcaaattcttcgccgcccatgcgcgccaccagccccttatcaccgacaatcttctgaatatgccgggcaaacacgcttaacactttatcgccacattcatgtccatagttatcgttaatgcttttgaaatagtcgatatcaagcagcatgaccgtcagatgttgtgtctgtttcagcgatggacttttcagcgcctcataaagaccggaccgtgagtaaacctgagtcagaaaatcaaagtcggctcgcagcgcaacttgcttcattagcgaattgatcgctgccacgctaaaagaaaccataattgggcatatcgccatcgtggcaataccgagacgtgcggagaacatttccggaatggagaacggcgaaccgaccgagatatcaatcaccgaatttgccaccagtacgatttccaccgcaccggtgacaaaggtcaacagacatgttacctgcggcgtatagcgcactgcacaccagattaatgcaggcagcgggaacgccagactccccgctccgccaatgactaccgaggcaataaccgacacaataagcgcgatggcgggcatcatctgttctgctttaaagcgcggcagcactccaggaatagccaacgtcagcatacaaggcacgatcaaaacgcccgttgagaattgctcactgaaccagtccgcaagcaaaggccagaaatccagactatcaatactgaccgaaccaatcgccccgacaatagcgcataataatgcggcaatcagacagtaattaaatagccgtaaggcacttactggctcatacttatttttccccagacgcttatcccgcacgaccagtaaggcgacggtaacaataaacatcatattggagaaattgataaccagtgaaaccagtccccattcggtggttatggcatcataaaccagcatcgccacataactgatcgcatagtaatgcagtcgattaagccagacatagcgggcaaacacccccgccattacgccattcagcggccagaaaagagaaagttcgtgaaccagccgtaactctgcaccaataaaatagaacagcgtggttagcgcaaaaatagcgatgctattacgtagcagatgaccttcctggaacaaacggaaagttgaaatggggtgtacatgcattaattatctgtccatacaattgcgggtggcaattatctcaacgtaataagtaaattctcataaaggatagcatgttcgctaacagcggcggcaaataaaggtaccctgggaatgctattttatcgttttccgcaattctcatggctgattcatctgtacaaccagccagtgatagattaccgccacgatataacgttgttgttcttcgcttaacgaaacaccctgcggaatgttatgccacttagccagacaaccgcgacagcaggtcgcggtggcgtgctgagcgataaacaccggatgcccgcgcatgggggtttgcttaccgtcattagccggtaatgccggagcaagacgtttagcgacaaaatccgccgcatgttgttcgatgactggcgcgcctttctccaggcaatactgacgctctttcatgcccagacgaaagcgagagcgaaattttgaacgggataaacgcgcgaagagtggatcgagagactgcattaataaaccgaacgccctaactgtttcgtcaattgttcaaggacggcaatacccgcaagcgagttacctgcatcatccagttccggactccagacagcgatggccatttcatgcggaacaatcgccacaataccgccaccaacgccagatttcgccggtagccccacccgccaggcaaactcccccgcgttctggtacataccactggtcgccatcagcgcgttaatttgccgcgcctgcattggcgtcaccacaggttcatcaatatgaatagctttcccctgattagccagaaagacaaacgtccgggccagctctacacagctcattttcagagcgcagtaatgaaagtagttttgcagaacggttgtcacatcatgatggaaattgccaaacgacttcatcagccaggcgatagccgcatttcgcgcggaatgttcaaattcggaacgcgctaccaccgtatcgtatgaaatatcagacacaccgcttaagccgcgcacgacttccagcatacgttgccgtggtgcgcttaatcgcccttgcaacatatcgcaaaccaccagcgcaccagcattaataaacggattacgcggaataccctgctccatttccagttgcactaaagaattgaacggtgatccagacggatctttgccgacgcgttgccagatttcctcttcggagtaatgacgcatggcgacaacgagactcagcactttggaaatagactgaatggaaaaacgttcttgcgcgtctccggcctgaaaaagctgtccgtcaacggtacagatagcaatgcccaatcgggaaccgtctactgtagccagcgccggaatataatccgcgactttaccctgaccaatgagcggccgcacttgccgcaagatgttttctaaaattgcattatccatggcgactgccactttctactcctggaccgcaggtctgaaaagacctgcgagtatatcagagctgaatatgtcgcgtcagatccggtctttccacaccgtctggatattacagaattcgtgtaagccgaaatgggaaagctcacgaccaaagccactctttttcacgccaccaaaggccactcgcgcgtcgctggcacaataaccattgataaacaccccaccgcattccagacgtgccgccatctgtctggcctgtgtttcgtcggtggtaaaaatggtcgctgaaaggccgaactcactatcattagccagttccagcgcatgttctgcatctttcgcaacggtgattgccgcaacagggccaaacatttcttcccgaaacgcggtcatttctggggtaacattcgccagaaccgttggcggatagtagttacctgccccagccatcttttccccgcccagtaacaaacgcgcaccctgcgccagggttttctccacctgatgatgcagctcatcacgtaaatcaaaacgagccattggtccgagagcgttctcttcatcacggggatcgcccattttcaaggctgccgcagctgccacaaaacgttcggtaaatgcagaagcaattccctcttcgataataaagcgttttgccgctgcacaaacctgtccggtattctgataacgtccggctaccgccgctttaaccgccagttccagatcggcatcgttaagcacaataaatggatccgaaccgcccagttccagtacgcattttttcagtgccgctccagcctgtgcgccaatagccgctcccgcacgaacacttccggtcaccgtgacagcagcaatgcgcgaatctttaatcatttgactgacaccgtcgttgtcggcatttagccagccatatacgccttgcgggattcccgcatctttaaacacctgggcaatgagctgagcacagcccatcacattcggcgcatgtttaagtaagtagccgttacctgcaagaatgatgggaaccgcgccacgcatcacctgccataacggaaagttccacggcataatcgccagaatcgtccccaacggtcgatactcaataactgcctgctgattttccaccagcgtaggttccgccttcagcattgccggaccatgttctgcataccagtcacacaaattcgccgatttcgccacttcagcgcgcgcctgattgattggtttgcccatttcacgggtgatcatttgcgccatttcttcgctacgggcgcgcagagccttaccgataccacgcagtttttcagcacgataatctatatttgtctcgcgccagtcgcgaaagcctgctgccgccagctgaagtgcgttttcgatatcgttagcgccagcccaaggcagcacagaaagttgttcacccgtggcaggatttattgaaattgcatgagttgccggagtaatggtcatcggggtatctcctttatgagtcatggtatgaagatacgcagatttactcttgctttaaaatgaataatattaagccacttattcacgaatcgagaatgttatggatctgacccaactggagatgttcaacgcggttgccgaagctggcagcattacccaggctgcagcaaaagtgcatcgcgtaccgtcgaatctcactacccgtctacgccagctggaaacagaactgggggtagatctgtttattcgcgagaatcagcgtttacgtctctctcctgccgggcataactttttacgctatagccaacaaattctcgcgttagtggatgaagcgcggagcgttgtcgctggcgatgagccgcaaggtttattttctcttggttcgctggaaagcaccgcagcagtgcgcattccggccacgctggcggaattcaaccatcgttatcccaaaattcagttttcactttccaccggcccttccggcactatgctggaaggagtgctggagggaaaactgaatgcggcatttattgatgggcccattaaccatactgccattgacgggataccggtataccgcgaggagctgatgatcgtcacgccacaaggtcatgcgccagtaatccgcgccagtcaggttaacggcagtaacatttatgccttccgcgccaattgttcgtatcgtcgccacttcgagagctggtttcatgctgacggtgccgctccgggaactattcacgagatggagtcgtatcacgggatgttggcctgtgtggtcgcaggagcaggcattgcgcttattccacgctctatgctggaaagtatgccggggcatcaccaggttgaagcgtggccgttagctgagcaatggcgttggttaacaacctggctggtctggcgtcgtggtgcgaaaacgcgtccgcttgaggcatttattcaactactggatgtgcctgactcggcaaaacagggttaccaatgagctatttttgatagttcttgcagctcaaatgccctatatagtgatgttccgatgacttatgactatatggggcaaatatggttacgccagtaagcatcagcaattacatatctcttcctgatgattttcccgttcgtaatattgcaccacaggtaaaagaagttttaaaggactttattgatgcgccaagtacaataatatgtgatgaagagtggcgcacgtctttaaacatcaactcagccacaaaaaagatatttaataaccttgataacttatcatatattcagaggacttcttttcggggtaacgacacgctatacaatgaaaaggttcagtttaaactcacttatcccgtcaagaatggaagacacaaagaaaatattgaatttcaggtagtaataaatttaagccctatttatttagataattttcgccatgatggagaaattaatatttttgcgctcccaacccaaagcctgtcactatggggcgcgtatttcagaccggcgtcgagcgtgtgctatttctgtttctgaatgattttattgaacaatttccaatgatcaaccctggcgttcccatcaaaagagcgcatacaccacatattgaacccctgcctccggatcgccataccgctgcagattacttacgccagtttgatttgcttgtcctgaattttatctctcgcggtaattttgtcatactcccccgattatggagtaactctgaggttcacagatggttcgtcaataaagatcctaacttgatcaccgccattctcgacataacagacggcgaattaaaagaggatttattgcaaagcctgatggattcattaggttctaacaaacatgtactacccgaagtctgcatctgctttttatcccttttagcagaacaagaatctcctcattttcaggactttttttatttttcgccaatatgttattgcactatcaccaatttatgaatcccaatgaaagtgatctgaatgacgtgttgatgccagcatcattaagtgatgataaaattatcaaacatatggcgcgcaggaccctcaaactgtttgtaaaaatgaaacgccgccaaaagttactcacgaagacctggtgaaaaacaggcctcgctcccctgtcagaccacctatacccgcaaccgccaaaacgccagacctccctgaacgtcattaaaccgtgatgttaccgactctctgacgcggaacagaatcagcgtcagagaaacggaaaacgcgatccagatcacaaatgcattgtattcacatcattaaccgttttaagatcatttcatcactttttcgcaactcacccgataatctgttatgacaacaaacactgtttcccgcaaagtggcgtggctacgggtcgttacgctggcagtcgccgccttcatcttcaacaccaccgaatttgtccctgttggcctgctctctgacattgcgcaaagttttcacatgcaaaccgctcaagtcggcattatgttgaccatttatgcatgggtagtggcgctaatgtcattgccttttatgttaatgaccagccaggttgaacggcgcaaattactgatctgcctgtttgtggtgtttattgccagccatgtactgtcgtttttatcgtggagctttaccgttctggtgatcagtcgcattggtgtggcttttgcgcatgcaattttctggtcgattacggcgtctctggcgatccgtatggctccggccgggaagcgagcacaggcattgagtttaattgccaccggtacagcactggcgatggtcttaggtttacctctcgggcgcattgtgggccagtatttcggttggcgaatgaccttcttcgcgattggtattggggcgcttatcacccttttgtgcctgattaagttacttcccttactgcccagtgagcattccggttcattgaaaagcctcccgctattgttccgccgcccggcattgatgagcatttatttgttaactgtggtggttgtcaccgcccattacacggcatacagctatatcgagccttttgtacaaaacattgcgggattcagcgccaactttgccacggcattactgttattactcggtggtgcgggcattattggcagcgtgattttcggtaaactgggtaatcagtatgcgtctgcgttggtgagtacggcgattgcgctgttgctggtgtgcctggcattgctgttacctgcggcgaacagtgaaatacacctcggggtgctgagtattttctgggggatcgcgatgatgatcatcgggcttggtatgcaggttaaagtgctggcgctggcaccagatgctaccgacgtcgcgatggcgctattctccggcatatttaatattggaatcggggcgggtgcgttggtaggtaatcaggtgagtttgcactggtcaatgtcgatgattggttatgtgggcgcggtgcctgcttttgccgcgttaatttggtcaatcattatatttcgccgctggccagtgacactcgaagaacagacgcaatagttgaaaggcccattcgggccttttttaatggtacgttttaatgatttccaggatgccgttaataataaactgcacacccatacataccagcaggaatcccatcagacgggagatcgcttcaatgccacccttgcccaccagccgcataattgcgccggagctgcgtaggcttccccacaaaataaccgcaaccaggaaaaagatcagcggcggcgcaaccatcagtacccaatcagcgaaggttgaactctgacgcactgtggacgccgagctaataatcatcgctatggttcccggaccagcggtacttggcattgctagcggcacaaaggcaatattggcactgggttcatcttccagctcttccgacttgcttttcgcctccggtgaatcaatcgctttctgttgcggaaagagcatccgaaaaccgataaacgcgacgattaagccgcctgcaattcgcagaccgggaatcgaaatgccaaatgtatccatcaccagttgcccggcgtaatacgccaccatcatgatggcaaatacgtacaccgaggccatcaacgactgacgattacgttcggcactgttcatgttgcctgccaggccaagaaataacgcgacagttgttaatgggttagctaacggcagtaacaccaccagccccaggccaattgctttaaacaaatctaacattggtggttgttatcctgtgtatctgggttatcagcgaaaagtataaggggtaaacaaggataaagtgtcactctttagctaaccttgcatcgcattgaccaaaacttgaaccgatttagcaaaacgtggcatcggtcaattcatttatttgacttatacttgcctgggcaatattatcccctgcaactaattacttgccagggcaactaatgtgaaaagtaccagcgatctgttcaatgaaattattccattgggtcgcttaatccatatggttaatcagaagaaagatcgtctgcttaacgagtatctgtctccgctggatattaccgcggcacagtttaaggtgctctgctctatccgctgcgcggcgtgtattactccggttgaactgaaaaaagtgttgtctgtcgaccttggagcactgacccgtatgctggatcgcctggtctgtaaaggctgggttgaaaggttgccgaacccgaatgataagcgcggcgtactggtaaaacttaccaccagcggcgcggcaatatgcgaacaatgccatcaattagttggccaggacctgcatcaagaattaacaaaaaacctgacggcggacgaagtggcaacacttgagcatttgcttaagaaagtcctgccgtaaacaaaaaagaggtatgacgatgtccagacgcaatactgacgctattaccattcatagcattttggactggatcgaggacaacctggaatcgccactgtcactggagaaagtgtcagagcgttcaggttactctaaatggcacctgcaacggatgtttaaaaaagaaaccggtcattcattaggtcaatacatccgcagccgtaagatgacggaaatcgcgcaaaagctgaaggaaagtaacgagccgatactctatctggcagaacgatatggcttcgagtcgcaacaaactctgacccgaaccttcaaaaattactttgatgttccgccgcataaataccggatgaccaatatgcagggcgaatcgcgctttttacatccattaaatcattacaacagctagttgataacgtgacaacgtcactgaggcaatcatgaaaccactttcatccgcaatagcagctgcgcttattctcttttccgcgcagggcgttgcggaacaaaccacgcagccagttgttacttcttgtgccaatgtcgtggttgttcccccatcgcaggaacaaccaccgtttgatttaaatcacatgggtactggcagtgataagtcggatgcgctcggcgtgccctattataatcaacacgctatgtagttattgtcaggctctgatcacagagcctgacatctccgtaatatcttcctcaagtctcaaatattttcgccattgttggcgatgagatcccgataccagtaaaacgacgctttacgtatccgttccagcgttcccttcccttcgttgtctttatcgacataaatcattccgtagcgctttttcatttcccctgttccggcagaaaccaggtcaatgcagccccacggggtgtagccaattaagtcaacaccatcttcaactacggcttttttcatttcccgaatatgggaagcaaagtaatcaatgcgatagtgatcgttcaccgtgccgtcagcttgtctctggtcaaccgcaccaaatccattttcgacaataaacagcggcaactggaaatgatcccagaaccagttgagtgaataacgtagccctgccggatcaatttgccatccccattcggatgtatcgatataagggttgctgaccaaatctcgtggttcaacataatccagttgcgggttatcgggcgaaaattgtgtcgtaaaagacatgtagtagctaaagccgataaagtcgacacaaccactggcaagaatcgcgttatcttctggtgtgatatcgaggttgaatcctttcctggcaaagtaattcagcatatgttgcggataatatccacgagcatgaacatcagtaaaccagtaacgacgatgcattgctttcgtggccatcatcatatcgttgggtgcacacgtcagaggatagatgggacacatggcgatcatacagccaatgttaaattcaggattgatcgattttccagtctgtaccgccagggcactggcaactaactcgtaatgtaccgcctggtacattatttgttcgcgctcattgatatcttcctctggcgaatacaagataccggaattagtaaatggacacaggctttcgctgaaattcacctgattattgatttcgttaaacgtcatccagtactttactttttctttatagcgcgtgaagaccgttgatgcgaagcggataaaaaagtcgatcagtttacggtttcgccagccaccatattttgtcaccagatgataaggcatctcaaaatgtgaaagcgtcaccacaggttccattccctgcttaaggcattcatcgaacagatcatcataaaattgtaaaccctcttcattcggctcctgttcgtcaccttgcggaaagattcgtgtccaggcaatggaagttcgaaagcatttgaatcccatctcggcaaataactgaatatctgttttatagcgatgataaaaatcaattgcttcatgattgggataattaagcccgtcgataacgccttctgtcacttcacgcggcaccccgtgagcgccagcagtcatcacatcagcgatgctgatgccttttcctccttcattccagccaccttccaactgatgcgcggctaccgcaccgccccataaaaaaccttttttaaatcctgacatacacaactccttaactaaaatagattaccaccagacttccgcctggatgccggccataaactcgtctttgctgttctcattaaacttaaaattcgataattcgttatccagaatattgatatacgttccatagaagcgaatttctggtcgtgaacctaaaatgctttcacccactttcaatgcatgccagagtgtcgttttataagccgattcatttagtgttacaccctgctgagttttgttctgttgcttaaaccagcctaattcaagccccgtctgattccatgtattccagatccaggccggtcttattacagtgcgaatactgtcaaaatcactatgagcaccactttcataactataaacatcttcgccgtgagaatagacaagcgcgttagccataataatattgtcagtaagatacatctcgccctgagagattaaacgccaggcgatcccattggtatgatcaccatagtaatagcgaccatgcgccatcgtattactggcatctgagaaactggcaaaactgctggcataggaattattggcaacctgtaacgtaaattcattaaacgtatcgcgttgcaggttttgccgtaaaacagaagtcagcatccagctatctttcatttcaaaataactgttgtcattttcgttatcttgttgttgatccgttttattaggtgcggaatatttagccattaatgataatgtcacatcatcccataacgggatattgcgataacgaacatccacagaattggtattcatctggctagtacgcgaaaatcacgagagtaaacatcgacatcatcacggcttaaggacatatcaaacagccctacaccaagtgcccagttttcaatccccacacccgcggcgacatccgtggttaaggttttccagtccagcatctggatctcatattgcgggagtttatgtttgccgacccagaagtctgcctctggtgcgaagggtaaaaaacctcgcgttgtcaggtaaatatcgctgaactgcatgatattttcattggcactgtcaccaaaccaggcatcgttatactgctcacccacgttgccatcataggtaacgaccgcatttgccgttttaccgtcctgattataaacacgctgatttaaggtcaggtcaaaccaaccgctcatctcattaccaaaacgtcccagagaacccgctgcataagtttgtggtgagccgtgattaccagtaccccagcctgagcggaagtacccctgatagctgaacccaatatcatcctttatatatttactgatatctttcagggtcacgctttcgatagtggttttgtcgcctttactttcaataacggcaacttgctgcgatccatttatagtatgcgctgcggcagacgagttctgttcaccgttttcatttttgatgttatcagcgacgggagatgtcgctgatatttcagcaagcgaggctgatttatatttgttttccgtgatgcttttttgtaaggtcgaaagtcgggatttatatactcccagttcattctgtgttgctttcagctcttgtttattttgcgacaattcattttcaagcaattcaaggcgctgctctatggttaattttgttgccatcgcgttcaatggaaacaatgctgtaataatagaaaaagacaaaaggctgacgttaagcgtctttatattcatgacttatccttaagagtataataatttcctccagctatcgcactggaggaaaaaatcaggcatggagttcttttcttaatgaaataatttccctggctaaatcctggcataatattgcattcatcaaatgatcctgtgcatgaatcagaattaaattaacttttattttgccacagccttcatcctgactaattaatgcggtctgaatcttatgtgcctgaagacaggcagattcagaactggccattagctgagttgcgccctgccagtctttttgcccggcacaacgtatggcttccatcgcgtcagaacgtgcctgccccgcgttgaccagtaactccataacaagttcttcatctgcaaacatcacaatctccttcctgggtaaatggaattatccgttagttgtcatgttattgactttgttggcggcaataacaaaaggtaaatagatcattgtcgccacacctaaacataaaaaaccaaccagtaaagccagccagttccccccggttccgaggaaagcaattaaaggtccgggcgtagtccagggcacggcataagcaaccggtggaataatttccatcgaaataaagaagtaaccaatggcacagttaacaatgggaaccataataaacggcaccatcatgatggggttaagtacaataggaaggccaaacattatcggttcattgatattgaaaataccggggataaatgacatttttgccagatcacggtattccgcacgcttagaagcgataaaaatagccaacaataaccccaacgtcatacctgaaccgccgcagttggcaaatgcatcattaatagaagtccaggtaatcggatatggcgcgccccaggtagtgccatgttgagcggcccaggagagattctccagattagcctcagaaaaaacggtttctcgaattgccgatgtggtattaggtccgtggatccccagcacccacaggaaattacccacagcccccaggataattaccgcaaagatattcgttcccatatgtttgagcggcgtctggattaatgtgtaaataagatcgtttagtcctgccggggatatcagtgtcaggcaataattaagtgcggaaaagaacaccatgacaaaaaatattggcaataaaactttaaatgaacgcgctaccgcaggcggtacagctgccggcatcgttatggtgatttttgggtttcgagctaagcgacaaaatatttcactggtgatcaatgcaacgataacagcaacaaacaacccctgcgcgccgagatatttggtcgtcaggaatgcttgcccatctatcatctgatatggcgtataaacaataaaaaatgctcctattgccgttaatccgcataaaagatcatcttgctcatagctaatcgccatattcctggcgaccaggaaagcaatcataattgacatgatatttacagaaccattcattaccggagtaaaaatagcttgtgctttttcaaggttggggaaaatgctattcagatgcagtaatccggcaataaaaccgtctggcgataatatggcaaagttaattaatataattaatgaacttgccatgataattggaaacgtaaaaacgaatccatctctcaccgctgcaacatgtttttgtgagtttaacttgatagcaactggaacaagaaaacgttccattccacgttcgaatgaggccattaatcccatttttttatacctgttgttttggatatttatacatcccaataaagcatgtatgccatatccattttatgatgtgtgaaaagttagttcaggtaatagtttaataatattagattcttactcttgcagtagtttcatcgcaaattcaagaactgcctgtccgttcatggtgccgtagtctttcatctcgataacggctacaggcattttcccctgtgcaacggcttcaatctctggtttctgaaagcgaacttgcgggccaagtaaaacaacgtcaacttcgttatttttaattttccctttagcctctgcaatcgccaatgcggaaatattaacttcaagtgaaatagcgttagcatgatcaatcatacgtttaaccagcatactggttgacatgcccgcagcgcaaactaacaatatttttttcatattttcccttactggtatataacagattacattgtttaaatatcatatcccgcagtagctatacgtcctggtacattgatcacagtaatacagtgataaagttgttcaacatcagggtgattattaaacgactcggccatacgataaaccaatcaggactcaactccttgttttcaatggctcttaaaaggtgcaaaagtgatttttcaaaagattgcccgcttacttaaatccgaaatcaatggcaattcatggcatgttggtgatttgttgccgtcagaagcggaactcgctgttcgttataatgtttcgcgtaataccctgcgtaaggcattatccttgctggaaggcgaaggaattattcacagaaagcatggttcaggaacatacattcaaaaaaagaattttgttgcacacattgatcacatgaacagtttcagtgaaattgcgcataaaagcggcaaagaggcagggagtcagattatgaaatttgaagtgcaggatgcttcacccactattgcgactgagctgaatttagtgactggtgagcaggtttattacataaagagactgcgattcattgaggataatgcagcacaattagaagaaacgtggatgtcagtagcacgttttcctgatttaaccgtgtcacatatgcaaaaatccaaattttcatatattgagaatgaatgcgggatcaaaatcattggcacctttgaaactttctcccctacttttcctaccccagaaatcgccagtattttacggatcagcccacgggatcccatacttaaaattcagacccaggctgtggacagtaactctattccgctggattattcgttactttacagcaatattttcgagttccaggtaaagtactttttcccgcgataaaagcagacgcacagagtgctgacatcacattctgtgcgtatggtttagcctctaacctttaccgctttacgccaccgcaagccaaatacattgatatacagcccggtcataatgagcaccgcacctaaaaattgcagacccgttaagcgttcatccaacaatagtgccgcacttgccagtccgactacgggcaccagtaacgataacggtgcaacccgccaggtttcatagcgtcccagtaacgtcccccagatcccataaccaacaattgtcgccacaaacgccagatacatcagcgacaagatggtggtcatatcaatagtaaccagactgtgaatcatggatgcggaaccatcgagaatcagcgaggcaacaaagaagggaatgattgggattaaagcgctccagattaccagcgacatcaccgccggacgcgttgagtgcgacatgatctttttattgaagatgttgccacacgcccaactaaatgctgcagccagggtcaacataaagccgagcatcgccacatgctgaccgttcagactatcttcgattaacaccagtacgccaaaaatcgctaaggcgatccccgccaattgtttgccatgcagtcgctccccgaaagtaaacgcgccaagcacgatagtaaaaaacgcctgtgcctgtaacaccagcgaagccagtccagcaggcataccgaagttaatggcacaaaaaagaaaagcaaactgcgcaaaactgatggttaatccataccccagcagcaaattcagtggtactttcggtcgtgcgacaaaaaagatagccggaaaagcgaccagcataaagcgcaaaccggccagcatcagcggtggcatgttatgaagccccactttgatgaccacaaaatttagcccccatacgaccactaccagtagcgccaacaccccatcttttcgcgacattctaccgcctctgaatttcatcttttgtaagcaatcaacttagctgaatttacttttctttaacagttgattcgttagtcgccggttacgacggcattaatgcgcaaataagtcgctatacttcggatttttgccatgctatttctttacatctctaaaacaaaacataacgaaacgcactgccggacagacaaatgaacttatccctacgacgctctaccagcgcccttcttgcctcgtcgttgttattaaccatcggacgcggcgctacgctgccatttatgaccatttacttgagtcgccagtacagcctgagtgtcgatctaatcggttatgcgatgacaattgcgctcactattggcgtcgtttttagcctcggttttggtatcctggcggataagttcgacaagaaacgctatatgttactggcaattaccgccttcgccagcggttttattgccattcctttagtgaataacgtaacgctggtggtgctcttttttgccctcattaactgcgcctattctgtttttgctaccgtgctgaaagcctggtttgccgacaatctttcgtccaccagcaaaacgaaaatcttctcaatcaactacaccatgctaaacattggctggaccatcggtccgccgctcggcacgctgttggtgatgcagagcatcaatctgcccttctggctggcagctatctgttccgcgtttcccatgcttttcattcaaatttgggtaaagcgcagcgagaaaatcatcgccacggaaacaggcagtgtctggtcgccgaaagttttattacaagataaagcactgttgtggtttacctgctctggttttctggcttcttttgtaagcggcgcatttgcttcatgcatttcacaatatgtgatggtgattgctgatggggattttgccgaaaaggtggtcgcggttgttcttccggtgaatgctgccatggtggttacgttgcaatattccgtgggccgccgacttaacccggctaacatccgcgcgctgatgacagcaggcaccctatgtttcgtcatcggtctggtcggttttattttttccggcaacagcctgctattgtggggtatgtcagctgcggtatttactgtcggtgaaatcatttatgcgccgggcgagtatatgttgattgaccatattgcgccgccaggaatgaaagccagctatttttccgcccagtctttaggctggcttggtgccgcgattaacccattagtgagtggcgtagtgctaaccagcctgccgccttcctcgctgtttgtcatcttagcgttggtgatcattgctgcgtgggtgctgatgttaaaagggattcgtgcaagaccgtgggggcagcccgcgctttgttgatttaagtcgaacacaataaaaatttaattcagccttcgtttaggttacctctgctaatatctttctcattgagatgaaaattaaggtaagcgaggaaacacaccacaccataaacggaggcaaataatgctgggtaatatgaatgtttttatggccgtactgggaataattttattttctggttttctggccgcgtatttcagccacaaatgggatgactaatgaacggagataatccctcacctaaccggccccttgttacagttgtgtacaaggggcctgatttttatgacggcgaaaaaaaaaccgccagtaaaccggcggtgaatgcttgcatggatagatttgtgttttgcttttacgctaacaggcattttcctgcactgataacggatcgttgacacagtagcatcagttttctcaatgaatgttaaacggagcttaaactcggttaatcacattttgttcatcaataaacatgcagcgatttcttccggtttgcttaccctcatacattgcccggtctgctcttccaatgaccacatccagaggctcttcaggaaatgcgcgactgacacctgctgtcacggtaatgttgatatgcccttcagaatgcgtgatggcatggttatcgactaactggcaaattctgacacctgcacgacatgcttcttcatcattagccgctttgacaataatgataaattcttcgcccccgtagcgataaaccgtttcgtaatcacgcgtccaactggctaagtaagttgccagggtgcgtaatactacatcgccgattaaatgcccgtaggtatcattaaccaatttaaatcggtcaatatccaacaacattaaataaagattcagaggctcagtgttgcgtaactgatgatcaaaggattcatcaagaacccgacgccccggcaatcccgtcaaaacatccatattgctacggatcgtcagcaaataaattttgtaatcggttaatgccgcagtaaaagaaagcaacccctcctgaaaggcgtcgaaatgcgcgtcctgccagtgattttcaacaatagccagcattaattcccgaccacagttatgcatatgttgatgggcagaatccattagccgaacgtaaggtaattcatcgttatcgagtggccccagatgatcaatccaccgaccaaactggcacagtccataagaatggttatccgttatttctggcttactggcatctctcgcgaccacgctgtgaaacatactcaccagccactggtagtgggcatcgatagccttattgagatttaacaagatggcatcaatttccgttgtcttcttgatcattgccactcctttttcacagttccttgtgcgcgctattctaacgagagaaaagcaaaattacgtcaatattttcatagaaatccgaagttatgagtcatctctgagataacattgtgatttaaaacaaaatcagcggataaaaaagtgtttaattctgtaaatcacctctgcattatcgtaaataaaaggatgacaaatagcataacccaataccctaatggcccagtagttcaggccatcaggctaatttatttttatttctgcaaatgagtgacccgaacgacggccggcgcgcttttcttatccagactgccgctaatgttgatcatctggtccggctgaacttctcgtccatcaaagacggccgcaggaataacgacattaatttcaccgctcttatcgcgaaaaacgtaacggtcctctcctttgtgagaaatcaaattaccgcgtagtgaaaccgaagcgccatcgtgcatggtatttgcgaaatcaacggtcatttttttgcatcatcggttccgcgatagccatcttctattgcatgaggcggcggtggcgctgcatcctgttttaaaccgccctggtcatctgccaacgcataaggcatgacaagaaaacttgctaatacaatggcctgaaatttcatactgactccttaattgcgtttggtttgacttattaagtctggttgctatttttataattgccaaataagaatactgccaattgttataaggcatttaaaatcaggcaactagctgtcaaatattcagagaatttaactcactaaagttaagaagatcaaatagtcttaaatatattttcagaataatcggatttatatgtttgaaaattattatattggacgagcatacagaaaaagcaaatcacctttacatataaaagcgtggacaaaaaacagtgaacattaatagcgataaaattgtacaacttgcagataccgacactattgaaaacctgacatccgcgttgagtcaaagacttatcgcggatcaattacgcttaactaccgccgaatcatgcaccggcggtaagttggctagcgccctgtgtgcagctgaagatacacccaaattttacggtgcaggctttgttactttcaccgatcaggcaaagatgaaaatcctcagcgtaagccagcaatctcttgaacgatattctgcggtgagtgagaaagtggcagcagaaatggcaaccggtgccatagagcgtgcggatgctgatgtcagtattgccattaccggctacggcggaccggagggcggtgaagatggtacgccagcgggtaccgtctggttcgcgtggcatattaaaggccagacctatactgcggttatgcattttgctggcgactgcgaaacggtattagctttagcggtgaggtttgccctcgcccagctgctgcaattactgctataaccaggctggcctggcgatatctccaggacagccattggtggtgtttatatgttcaagccacgatgttgcagcatcggcataatttgaggagccttaccgcgccattgtcgatacaggcgttccagatcttcgctgttacctctggaaaggatcgcctcgcgaaaacgctgcccattttcacgcgttaatccgccctgctcaacaaaccactggtaaccatcatcggccaacatttgcgtccacagataagcgtaataacctgcagcatatccgccaccaaaaatatgggcgaaataactgctgcgatagcgtggcggtatagcaggaagatccatattttccgccaccagcgcccgcaattcaaaatcatcgacatcctgcattgcttcgttttcttccaggcaatgccagcgcatatcgagaagtgcggcgctaagcagttcgctcatctcataccctttgttgaacaggctggcattacgcattttctgttgcagttcgtcaggcattgctgccccgctctgataatgccgggcgtagcgagcgaatacctgcggatgcgttgcccagtgttcgttgatttgcgacggaaattcgacaaaatcacgcggcgtgttggtgccggaaagcgtggcataacgctggcgggcaaaaaggccgtgcagcgtatgaccaaattcatggaataaggttattacatcatcccagagtaacaacgcaggctcaccggcagcgggtttctgataattgcaaacgttataaattaccggatgcgtttcattaagcgttgattgctcaacaaaattgcccatccatgcaccgccgctttttgaatcacgggcgaagaaatcaccgtaaaataacgccagtcccacgccattatgatcaaaaatttcccacacacgaacgtcaggatggtagacaggaatatcaaaacgttcgacaaacttaataccgaagagctgattcgcggtccagaatacaccttcattcaacaccgtgtttaattcaaaatatggcttgagctgcgcctcatcaagatcaaatttctcccgccgtacctgttcggcataaaatgcccagtcccacggctgcgcgctaaacccgccctgctgcttatcaataaccgcctgtatggaggctaattcatcgctcgcacgttgacgcgccgctggaacaatttcccgcataaagttgagcgctgcttcaggtgtttttgccatctgatcggcgattttccatgcggcataatgaggaaaaccaagtaatgtcgcctgttgtgcacggatctccaccagacgttgaatgatagcgcgggtatcattgccatcatttttttccgctcgcgtccagcccgcaataaacagtttttcacgcgtcgcacgatcgcgcatttcggcaagcgccggttgttgggtggtattcagcagcggaatcagccatttgttatccagacctttctcgcgagccgcctctgccgccagcgcaatctcttgctcactcattcctgccagctgcgcgatatcgttcacaaccagaccgccggatttatttgctgccagtaaccgctggttaaactgactggtcagtgtcgcagcttctgtattcagtacttttaattttgctttatcagcttgcgcaagtttggctccggcaaggacaaaacgttgatgaatcacctccaccaggcggatggattcactatcaagccccagggattcacggcgctgccagacagcatctacccgcgcgaataattcaccgttcagatagatatcattagccagttccgccagttcagcggaaaactgttcatcaagacgctgtaattcatcattggtatgcgccgcagtcatcgcaaaaaagacgctggtaacgcgggtaagtaattctccgctttgttccagtgccagaatagtattgttgaaatcaggcgtttgcgggttaagcgcgatggcagcaatttctgcccgcttttgctgcattccctcatcgaatgccgggcgatagtgatgattggcaatttgatcaaaatgaggagccagatacggcagtgtgctttgcacaaggaaaggattcattgttgtcattttcttctcctgaacgcgaggtgttccatagcgtaggcttactgataacggagtgcaatcttgcaatccagtattacccgctcttaagcatcccgtgctatgttattgacacacaaaagcgttgaggaacagtgagatgatcgttttagtaactggagcaacggcaggttttggtgaatgcattactcgtcgttttattcaacaagggcataaagttatcgccactggccgtcgtcaggaacggttgcaggagttaaaagacgaactgggagataatctgtatatcgcccaactggacgttcgcaaccgcgccgctattgaagagatgctggcatcgctccctgccgagtggagcaatattgatatcctggtaaataatgccggcctggcgttgggcatggagcctgcgcataaagccagcgttgaagactgggaaacgatgattgataccaacaataaaggcctggtatatatgacgcgcgccgtcttaccgggtatggttgaacgtaatcatggtcatattattaacattggctcaacggcaggtagctggccttatgccggtggtaacgtttacggtgcgacgaaagcgtttgttcgtcagtttagcctgaatctgcgtacggacctgcatggtacggcggtgcgcgtcaccgacatcgaaccgggtctggtgggtggcaccgagttttccaatgtccgctttaaaggcgatgacggtaaagcggaaaaaacctatcaaaataccgttgcattgacgccagaagatgtcagcgaagccgtctggtgggtgtcaacgctgcctgctcacgtcaatatcaataccctggaaatgatgccggttacccaaagctatgccggactgaatgtccaccgtcagtaatttttatacccggcgtaactgccgggttattgcttgtcacaaaaaagtggtagactcatgcagttaactcactcacaagcaagaacgaatgaccgtcgaaacgcaacttaatcccacacagcctgtcaatcagcagatttatcgtattcttcgtcgcgacattgtccattgcctgattgcaccaggcacaccgttgtcggaaaaagaagtttctgttcgtttcaatgtgtcacgccagccggttcgtgaagcctttattaaactggcggaaaacggcctgattcaaattcgtccgcagcgtggcagctacgtcaacaaaatttccatggcccaggtgcgaaacggcagttttatccgtcaggccattgagtgcgcggtggcgcgtcgggcggcgagcatgattaccgaaagccagtgctaccaactggaacaaaatcttcaccagcaacgcattgccattgagcgcaagcaactggatgatttttttgaacttgatgacaacttccatcaactcctgacgcagattgccgactgtcaactggcgtgggataccattgagaacctgaaagcgaccgttgatcgcgtgcgctatatgagtttcgaccatgtttctccaccagaaatgctgttacgccagcatcttgatattttctctgccctgcaaaaacgtgatggcgatgcggtagaacgtgcaatgacgcaacatttgcaggaaatcagcgaatccgtgcgccagatccgccaggaaaacagcgactggtttagcgaagagtaattcatttactctcatcccatccgggatgagaggcttttccccccgccttacggctcatgcatgcatcaaaaagatgtgagcttgatcaaaaacaaaaaatatttcactcgacaggagtatttatattgcgcccgttacgtgggcttcgactgtaaatcagaaaggagaaaacacctatgacgacctacgatcgtaaccgtaacgcaatcaccactggcagccgtgttatggttagcggcaccggtcacactggcaagatcctgtcgattgatactgaaggtctgaccgctgagcaaatccgccgcggaaaaaccgtagttgttgaaggttgtgaagagaaactggcacctctggacctgattcgtctcggcatgaactaagtgtgtgaatgccgccgatggcggcattgctttttttacttcacggaatatttcgccacggtcgctttcgcgccatgcgctaataaagacaagtacgcttccgtcacttttgcagtaaacaagctattgtctggcaaatcatcaccaaagattgccttaatcgccagcaatgactggacgcgcgctttcccttcggcactactttgtacagccttctgaataacaggtaacagtgggtcactgatttctatcggatttccctgttcatcaacaccaccgacataacgcatccaacccgcgacgcccagcgccagcagatcgaacttgctgtcatgcgccagatgccagcgaacagaatccaacatccgctgtggcaatttctggctaccatccatcgcaatctgccaggttcgatgacgtaacgccgggttgctatagcgtgcaattaatcggttagcgtaatcttgcaaatcaacgccctgcactttcagcgtcggcgcttgttcctgcaacatcaagccatacgccgcataacgataatgttcatcttccatgcagtcattaatgtgctgatatccagcaagataacccaaatacgccaggaatgaatgactgccgttgagcatgcgcaacttcatctcttcataaggcagcacatcactaaccagttcggctcccgctttttcccattctggacgtccggcaacaaagttatcttctattacccactggcggaaaggttcacaggcaacgcccgcaggatcgcccacaccggtaagttgttcgattttcgccagcgtatcctctgtcactgcgggcacaatacggtccaccattgttgatgggaaagtcacgttatcttcgatccattgtgccagtttttcatcaacggctttcgcgtatgaagtgacaacgtcacgcataacatgaccgttttctggcatgttgtcacatgacatgacggtaaatgcgggaagtcctgccgctttacggcgggccagcgcctcaacaatcacccctgttgctgttttcggctggtggggattttgcacgtcggcagcgaccatcgggtgatcgagcattaactgtccggtcgccggagagtggaaataccctttttcggtgattgtcagagagacaatcgcgatttgcggttcacacatcgcagccaacacggtttctaagccatccatctgtacgtgcaaggcttttttaacgacgccaacgacgcgagccgtccacgcatcggccgacatttccgcaacggtataaagattatcttgctgttgtaaatcggcaatttgctgttcgccgccgattaagttgacctcataatatccccagtcactgaaatgttctgtagcaagaatatcggcatacacgccctgatgcgcacggtgaaatgcaccaaagcctaaatgaataattcttggggccaggttattacgatcataaacagggagtgtcgcttttgctgataacaaattatttcccataacaattccttaaatttaaatatggcaagctatatgttttgttatatgaataaaaatcccctctccggtaagagaagggattgagggtttacagacttctggaaggttgcgcagctcttacaacacgcggttgatcttccgcagcgtcttccagcgcacttaaatcacggtctttcacctctggcattttcagcgcagagattaaaccaattactgaatatgccatgatcataatggcgatcggataccaggattccgtcatggtgcagaaaatacccgccaggataggaccaaaaccggaagcgataagaccaccaatttctttagaaatagccatccgggtaaagcggtttttacagccgaacatttctgccatggtaatgttttccagagcaaataatcccagcaccgcacagttatgaatcacaatcagtgcaaccataatggtgctcggggcatagcttttatctacaatgatagaaagcattggccatgccagcacaatcgcggaggtattcataataatatacgggatccggcgaccaattttatcggataaccaaccaaggaacggaatggtcataaagccgagaatcgaactaatcatcaatgcatctgttggaattgctttgttaaacaataacgtctgcactaaatagcctgcaaggaaagtctgaattaacccggagttacccgcctgaccaaaacgcagccctgttgccagccagaaggatttgctctggaacatgctaccagcaggtgcaggttttgctgtgggttggttgctgtcattaaccttctcaaagaccgggctttctttcagattcatacgtaaccagatagcaaagaccatcacgacaacgctcgccaggaacggtatacgccatccccacgccagcagttcctctttactgagaatgaagaacataaaggcccagattgccgttgcgctcaaggttccgcagttagttcccatagctacaaatgaggagataattccgcgcttaccttttggtgcatattccgccagcatcgtaccggcaccggaaatttccgcacctgcacccaacccctgaataatacgcagcgtcaccagcaagatgggggcaaaaacaccaatctgtgcataggtcggtaacacaccaattaaggtggtacagatccccatcatggtgatggtaataaagagcacttttttacgccctattctgtcgcccattttgccgaaaataaatgctccgacaatacgcgccacataacctgcaccgtaggttcccattgccaaaattaacgccattgccgttgatgattcaggaaaaaatatttcatgaaacactaacgctgcgccgagcgaatataactggaaatccataaattcaagcgcagatgcccagccatcccgatwcwactgctgctttcaccaaatcct

SEQ ID NO: 558 - DNA, 32 bp, Escherichia coli
  modified_base (17)..(17): a, c, t, g, unknown or other
  modified_base (22)..(22): a, c, t, g, unknown or other
ctcatcactgttgaaancagcnacgaagcctg

SEQ ID NO: 559 - DNA, 515 bp, Escherichia coli
  modified_base (497)..(497): a, c, t, g, unknown or other
  modified_base (500)..(500): a, c, t, g, unknown or other
  modified_base (502)..(502): a, c, t, g, unknown or other
  modified_base (504)..(507): a, c, t, g, unknown or other
  modified_base (510)..(515): a, c, t, g, unknown or other
ggttaaccggttaaggcttgttaaccattcggaattcggaattgcttcaaggaacggtaacggttaggctgttacaatggccacgggattggtgcgccaggcggataaaactgctctgatggcgtatagagtgaataaactgtaccgtccgttaacccttccggcttattagcagaatatgctggtgacgtatgaatcgtcacgctggcattactggtataatcccattgaatatttacaccagtcgcataatttccgattgcaacgtaaatatcgtaagtatcaccagatgtattgacccaggcaaaatttgtaaaccctgtcgatgtgcgctgccataaagcaccagtaatccccttcggattaccattacctgcacgcaaaacaagttcagatatacctgcctgttgaggtgamccgacgttaaatccmgcgccaccaatcaacgtaattgaaacaacrraactcgcctgtggcatggttaccgttgctaattngancnannnngcnnnnnn

SEQ ID NO: 560 - DNA, 23 bp, Escherichia coli
  modified_base (19)..(19): a, c, t, g, unknown or other
  modified_base (22)..(23): a, c, t, g, unknown or other
aaggtcataggctgccttnacnn

SEQ ID NO: 561 - DNA, 78 bp, Escherichia coli
  modified_base (4)..(4): a, c, t, g, unknown or other
  modified_base (8)..(14): a, c, t, g, unknown or other
  modified_base (18)..(18): a, c, t, g, unknown or other
  modified_base (23)..(23): a, c, t, g, unknown or other
  modified_base (26)..(30): a, c, t, g, unknown or other
  modified_base (32)..(32): a, c, t, g, unknown or other
  modified_base (35)..(48): a, c, t, g, unknown or other
  modified_base (53)..(55): a, c, t, g, unknown or other
  modified_base (58)..(58): a, c, t, g, unknown or other
  modified_base (60)..(63): a, c, t, g, unknown or other
  modified_base (65)..(73): a, c, t, g, unknown or other
  modified_base (77)..(78): a, c, t, g, unknown or other
agcngctnnnnnnnagcntgccncannnnngncannnnnnnnnnnnnncgttnnngangnnnngnnnnnnnnntcgnn

SEQ ID NO: 562 - DNA, 304 bp, Escherichia coli
  modified_base (1)..(11): a, c, t, g, unknown or other
  modified_base (18)..(18): a, c, t, g, unknown or other
  modified_base (34)..(34): a, c, t, g, unknown or other
  modified_base (41)..(41): a, c, t, g, unknown or other
  modified_base (172)..(172): a, c, t, g, unknown or other
  modified_base (174)..(179): a, c, t, g, unknown or other
  modified_base (196)..(196): a, c, t, g, unknown or other
  modified_base (204)..(204): a, c, t, g, unknown or other
  modified_base (229)..(229): a, c, t, g, unknown or other
  modified_base (233)..(233): a, c, t, g, unknown or other
  modified_base (241)..(242): a, c, t, g, unknown or other
  modified_base (248)..(248): a, c, t, g, unknown or other
  modified_base (257)..(257): a, c, t, g, unknown or other
  modified_base (259)..(261): a, c, t, g, unknown or other
  modified_base (273)..(281): a, c, t, g, unknown or other
  modified_base (283)..(287): a, c, t, g, unknown or other
  modified_base (292)..(299): a, c, t, g, unknown or other
  modified_base (301)..(304): a, c, t, g, unknown or other
nnnnnnnnnnntgctgtnacgcccggcttcatcnggatttnctgaggccagcgtgttcaccaccaccgtggtgctgttacgttttgctttcagctggattgtgcagttctgtaccggttttcctgtgccgtctttcagtacacctgaaatctttactgccatattcaccccncnnnnnngcccgcctgaaccggcnggctgtcntaacactgtgttacctggctaatcngaanttataacnnacaccnacgatgaancnnncagtgcgccagnnnnnnnnncnnnnnccttnnnnnnnnannnn

SEQ ID NO: 563 - DNA, 63 bp, Escherichia coli
  modified_base (1)..(4): a, c, t, g, unknown or other
  modified_base (10)..(10): a, c, t, g, unknown or other
  modified_base (20)..(20): a, c, t, g, unknown or other
  modified_base (29)..(31): a, c, t, g, unknown or other
  modified_base (34)..(34): a, c, t, g, unknown or other
  modified_base (38)..(38): a, c, t, g, unknown or other
  modified_base (47)..(49): a, c, t, g, unknown or other
nnnngtcatnacttccggtnagcacatcnnncgntttncccttgttnnnagttacgcggagat

SEQ ID NO: 564 - DNA, 1051 bp, Escherichia coli
  modified_base (248)..(248): a, c, t, g, unknown or other
ggcgcaagctgaccgttatcaatctgcgtccacaactcctgggccagatgtgmwkwtktkttttcccgatttctcctttgaaaaaatccaggtaaccttccgcatcatcgctcgcccgaccgacggcctccacgaatgccgatttgccaacggtgttcacactgcggatataaaagtaataatcatggcccggtttgatattgatactggcggctatccagtacagccccgtgccaaggtagcgcgcnctggtttcaacctgcctgatatcggyaatccgcgttttccgagaaccagaactcaaactgtaccgtcggatcataaaccgcaagatgcggcgtggcggttatctgaaaatagcccggcgtcagctcaatcctcgacggtgctgccggtgcggcaatccggaacgataccgacgccggatcgccctgctgcccccrggcatttacygcccggactgtcagcctgtagttccccagcgccagttgtgtgaagcggtatgtggtttccgccgtccgggctgtgctgaccagccgctcactgccgtcatccgctgccacggtcaggcgaagcataaagctcacgcccttcaccaccttcggcgtgtcccagcgcgccagcacctggtattccccgctgtctgcggtgacttctgcggtcaggtgctgyacygctggcggcgtgacgccattcaccgtgccgctctggtcgccgtcaaagtgcgccccgttatccacgatggcctctttttccggtacatgctgcacggcggtgatggcatacgtgccgtcgtcgttctcacggatactcacgcagcggaacaggcgctggcgcagcgtcggcagcttcagcccccacacgctgtatccggcaacgccgtcaggaacacggctcactttcaccttcacgccgtcggtgacggactggacctccacgctgaccggattaccctgaccgtcaaccaggcttatcagcgtggtaccggaggatggcagcgtgatttcacggtcgagcgtcgagcgttccgggtctggcgtgttcaccgcca

SEQ ID NO: 565 - DNA, 482 bp, Escherichia coli
  modified_base (1)..(2): a, c, t, g, unknown or other
nnatcgacggtcggtcctgcacgaacgtcagcgtctgcccgttccataccggcatacagcgcatcgccgagcagaaaatcactgagcacatcccacgccttgcgctgtgtggtcagccaggcattacaggtgatgcgcggctccatgccgccaaagccgtccggcaccgactggtcgcagtactggccgatgacatacagcgcccatttgtccacatccgccgcaccaagacgtttccccatgccgtagcgtggatgggtcagcatatcccacagacaccaggccatgttgttgctgtatgctggcttaaacgttccgtcccagataccgctgtattgccgcgtctgcgggttatagttcgacggcacctgcagaatgcgcccgcgaagatgataattacggctcacctgctggctgccgaactgttccgcagtcacctgcgacagccggaccagttgccgtgtcggtagcactgttcatca

SEQ ID NO: 566 - DNA, 460 bp, Escherichia coli
cgacggcacctgcagaatgcgcccgcgaagatgataattacggctcacctgctggctgccgaactgttccgagtccacctgcacgccgaccagtgccgtgttcgggtagcactgtttcacatcgatgatttcggtgtatgacgaccagagcgttttgttctgcagctggtctgtggtgctgtccggcgtcattctgcgcatccggatattaaacgggcgcggcggcaggttatccaccaccaccgaggccagatactgcgaggtggttttgcccttaatggtgatgtctttttccgtcacccagccaccattacgctgtatctgaaccagcaggcgaacttccgacggattccggtccccctttgaggtggtttccaccagtgcctgcacaccgaaggtaaagcgcagacggtcgatgtttgccgacgtgatggtccgggtgatcggcgtgtcatatttc

SEQ ID NO: 567 - DNA, 401 bp, Escherichia coli
aatccgtccaccggaccttcaaccggcccttcgctgatggcatcgatcacactcagcagctgcgtggacttcaggttgtccttcgcttcgcgcggggtatgccccttactgctgcctttacccattcctcacgctccataaatgacaaaaccgcccgcaggcggtttcacataaaacattttgcatcagcgaccaatcaccacaacctgaccaccgtccccttcgtctgccgtgcctgatctcctgagaaaccacrcgtgaccccacgcgcatttcaccgtacagaaccggcagaacattgccctgggcaaccatgttatccagtgaggagaaataggtgttctgcttacccgttatccgttgtctgtgtgacggggagttctggctttcggtgccagcat

SEQ ID NO: 568 - DNA, 265 bp, Escherichia coli
  modified_base (264)..(265): a, c, t, g, unknown or other
ccattgraaagagaatgtcactgaaagcgatactgatccccggcatccagattgccgtagcaatcaacgccgcacccagcaccgcctgaaacacaccgccactttttgctcccgcaagacgcggcacgatgtggatcacggcaccatttgccagcggctcattaagacgggatgataattcggtttctcctgcatcccgcccggcaatccgtacctgataccagccatcgctcagtttctgacgaacgmcgggagctgtgtggnn

SEQ ID NO: 569 - DNA, 456 bp, Escherichia coli
  modified_base (1)..(1): a, c, t, g, unknown or other
  modified_base (12)..(13): a, c, t, g, unknown or other
natccccgtaanngcagatgcgtgccatgcccggtgaygccagagggagtgtgtgcgtcgctgccatttgtcggtatacctctctcgtttgctcagttgttcaggaatatggtgcagcagctcgccgtcgccgcagtaaattgcggcgtgattcggcaccgatgaaccaaaacagcacagcagcacatcgcccggctgtgccgctgacaacggcacctgatacagccccgtcgcctccagattatccagatagagattctggccgttacgccaccagtcatcctcacgatgaaagtccggcatctcaatccccgccagatgataagcatcccggaacagtgtgtaacagtccgtcacaccgtgctcaaagcgccgcccggtgagatgcggcacacagcggaacttatgaatcgtcccccggcagaccagccaccacggcaaatcactctgcacctg

SEQ ID NO: 570 - DNA, 583 bp, Escherichia coli
tcaaagcgccgccggtgagatgcggcacacagcggaacttatgaatcgtcccccggcagaccagccaccacggcaaatcactctgcacctgcagccgccggtcggcctcactcagccagggcagaccaccgggatggctgtggaccagcgccacaatctcaccctgcatctctgcccgcagccagtcctccggcgacatccggaaatactcctccggctcaccggagatattcacgcagggaaaatatctttccccttccggcgttctcaccacgaagccgcacgactccgctggcgcacatcgccgggcgtgcgccagaatcgctgattctgtctctgtcatgggatttactgcgaaagtttgttaatggaaaggaagccgccaaagttgccgacgttattgcgaaacttacagccgctcaggcatttgctgcatttatccttcgtgatatcggacgttggctggtcatattcatccgcgaccgccggaccgckataaccgcactcatcgccgcgataggtccaggtgcaggtgttggccagcatgatacgtcccggaaaaacagcgccatccgtttccgtc

SEQ ID NO: 571 - DNA, 148 bp, Escherichia coli
  modified_base (1)..(8): a, c, t, g, unknown or other
  modified_base (10)..(10): a, c, t, g, unknown or other
  modified_base (12)..(16): a, c, t, g, unknown or other
nnnnnnnngntnnnnncattacagaaaaaataacgttctccaccgacctctgtcagatcgatttcccagagcaccacgctggccgactgctccgcacgggtgcattcattcagtgttcctgccggatatcctgcatcagttcaccacc

SEQ ID NO: 572 - DNA, 997 bp, Escherichia coli
  modified_base (14)..(22): a, c, t, g, unknown or other
tgctttgatgtgcnnnnnnnnnamcmattattatcaagcttgcgacgaagagcatcattttcagctttcgcatcagctaactccttcgtgtattttgcatcgagcgcagcaacatcacgctgacgcatctgcatgtcagtaattgccgcgttcgccagcttcagttctctgacatttttgtcgcgctgggctttgtaggttatggcgttatcacggtaatgattcagccccagactaagcgcaccacaggccaccagcagggcaatgatgaccacgcacagtacgcggttcatttcaccaccagcgtatctgaccgatgaaataaccggaggccataatcacaaacaccagccagataagaatgaacttccaggtggataatttttcagccatcactcgaatctcccgaatcagtttgctaaaatcaaacacactttctcctttgacttttccagagtcaggaaacacaaaaccccgcttgcagccaacaaacggggtttttacttttattcacttagtttttgtcagttcgcaggatttcgtgttatccgcccgcgtggccataccttatttttcagcaaaatattctgcttatctgtcgataccccagcacgccagcgcgctctcctggtcacgacgggatacctgaccgtagcagttgtttgaacgaatacggcagtctctgccaccgtccttaatccaccagcgaatcgcttcacacgctcccctgcgatcgcctgcattaattcgtttataaaacgtcgacgggaaacacttaccggggccaatgttgtaaggacagaatgacgcgatccccgctttctgaggttcggtcagtggcactctgatgtttttcgccacccatgccagcgccttatcacgttcaatggcgttaacctggtcgcattttccttcgacaacttcatgccgggacgacaagcttaccatcacctgggtgcaccacggcagatggtccagatacccacaccatcacggt

SEQ ID NO: 573 - DNA, 69 bp, Escherichia coli
  modified_base (1)..(2): a, c, t, g, unknown or other
  modified_base (4)..(8): a, c, t, g, unknown or other
  modified_base (13)..(15): a, c, t, g, unknown or other
  modified_base (18)..(18): a, c, t, g, unknown or other
  modified_base (28)..(28): a, c, t, g, unknown or other
  modified_base (32)..(32): a, c, t, g, unknown or other
  modified_base (64)..(64): a, c, t, g, unknown or other
  modified_base (68)..(69): a, c, t, g, unknown or other
nncnnnnncgtcnnnaanctggtcaagnatcngaggagcagacgcgcctgcagcaatcagcgcnagann

SEQ ID NO: 574 - DNA, 229 bp, Escherichia coli
atggaggcattattcacctctcgcagccttgcgcttatcttctttaatcttgaaataaaggtttgtcaggtacgtcagcaggccaaataccaggctacccagcacacctattgctgcccactgtgagggcgtgactttatcgagcagctgtaaaaaccagtaaccggcactacctgctgagastcgccataggcacacagggatagaatagcccccccccatgtacttt

SEQ ID NO: 575 - DNA, 36 bp, Escherichia coli
  modified_base (4)..(9): a, c, t, g, unknown or other
  modified_base (25)..(25): a, c, t, g, unknown or other
  modified_base (29)..(29): a, c, t, g, unknown or other
  modified_base (33)..(33): a, c, t, g, unknown or other
atcnnnnnnagtgcatggtgccggntgcntccnggt

SEQ ID NO: 576 - DNA, 188 bp, Escherichia coli
  modified_base (188)..(188): a, c, t, g, unknown or other
ccatcggggacttgaaccccggcgcagccagctttcgaaggctggcgctctrtcccgatgagctaatggcggtatgtgatatggtggcccttgctggatttgaaccagcgacctggcgattatgagtcgctcgctctcaccactgagctaaagggccgtgagcmraataataayggtccgtaattaan

SEQ ID NO: 577 - DNA, 591 bp, Escherichia coli
  modified_base (1)..(8): a, c, t, g, unknown or other
  modified_base (10)..(14): a, c, t, g, unknown or other
  modified_base (27)..(27): a, c, t, g, unknown or other
  modified_base (38)..(38): a, c, t, g, unknown or other
  modified_base (40)..(40): a, c, t, g, unknown or other
  modified_base (77)..(77): a, c, t, g, unknown or other
  modified_base (199)..(199): a, c, t, g, unknown or other
  modified_base (205)..(205): a, c, t, g, unknown or other
  modified_base (209)..(209): a, c, t, g, unknown or other
  modified_base (220)..(221): a, c, t, g, unknown or other
  modified_base (574)..(576): a, c, t, g, unknown or other
  modified_base (578)..(579): a, c, t, g, unknown or other
  modified_base (584)..(584): a, c, t, g, unknown or other
  modified_base (586)..(591): a, c, t, g, unknown or other
nnnnnnnncnnnnnccacggcaatccntacaggcggtngnaacctcaccctttccgccacactccggacaggcaacntttaccacctccctgwcytttttccattcttcccagtaagacggatacacgccttttgtgcactttgcccacactggtggcttaccatccggatactggaycttgtttgtaaaaactacgcnttcaanaaanttttccccatnncarcaggggcactgttttttgctcgccgcgctacgggcataatcttcaaacgcatacgaagccataatgcgcatcactaccggttttatttctgccggaagttttctcaacgccgccacacgatcgcaccgactgagtgcataatctgccagtaattctgttgcccgcgccctgtcattcatactgatgcccattttccccaggaacgcagaaaaccccatctcagcccgattctgtgtcatgccctgcgcggccatcacatcagtgatactcagcgcatctttgacgttgaggccgatgcatcggtcaggccaggggattttggggagtagtatttcggtaaatcttccagnnncnnttttngnnnnnn

SEQ ID NO: 578 - DNA, 79 bp, Escherichia coli
  modified_base (35)..(36): a, c, t, g, unknown or other
  modified_base (79)..(79): a, c, t, g, unknown or other
tatggggtaaatcttcacccccagacgtccaccanntactggctgaccacgaacgatattgatttcatcaaactgctcn

SEQ ID NO: 579 - DNA, 686 bp, Escherichia coli
  modified_base (641)..(641): a, c, t, g, unknown or other
  modified_base (652)..(652): a, c, t, g, unknown or other
  modified_base (666)..(686): a, c, t, g, unknown or other
gacgtaagttagccggcatggacagttcagcgcryrtccagtggtgctttcagaatattgtccaggtcgcgacgacgcttatccggtggctctgcaatcacctttatcgccagccttccggacaggcttaatttcagccgctgctggcgaacaataagcgccacagcccggcgataacgctttccctcctccgagataaaatatgtgctgccacggcgtcgccagtaagtgttcaccgtcggcgggtaaggtaaaaccaaatctatgagcatcagtcacctcttttacccaagcacgccagttgcaaaggcgtgatcaagaaaacgaaaaattaaatcaacctgagaaccatgcttttcttcgaacgccagaggatccgcatgaagctcgttgtgatgctcccgacacagcggtagcgtgaaaatatcgtgagattttgtccccattccgccctgaccatgaccaatcaggtgatggggatcgtcggctggcttaccacaacacgcacacggctgtgtcttcacccagcgtgtgtatttctcgttaacccagcggcgacgtttaggtcgtttcatgaaagattccggagactcaggatcaacggcaatgctgaccaccgtctcttcctgtggcgggttttnttgctggtggncgtgaggcagcggnnnnnnnnnnnnnnnnnnnnn

SEQ ID NO: 580 - DNA, 68 bp, Escherichia coli
  modified_base (1)..(1): a, c, t, g, unknown or other
  modified_base (32)..(32): a, c, t, g, unknown or other
  modified_base (36)..(36): a, c, t, g, unknown or other
  modified_base (41)..(50): a, c, t, g, unknown or other
  modified_base (52)..(57): a, c, t, g, unknown or other
  modified_base (59)..(63): a, c, t, g, unknown or other
  modified_base (65)..(68): a, c, t, g, unknown or other
nccagcggctggcgaacggcaggaacgacccngganggcannnnnnnnnngnnnnnngnnnnngnnnn

SEQ ID NO: 581 - DNA, 148 bp, Escherichia coli
cacggcccggcttaacgatcaccagcccgagttccggtaccagaacaggtcgaagtaatacccgcacgttacctccagatgcgttgctggaatgtgcgggacggacgcggtgggcgttcagagtaaggaagcctgacggagattatcc

SEQ ID NO: 582 - DNA, 157 bp, Escherichia coli
  modified_base (1)..(5): a, c, t, g, unknown or other
  modified_base (9)..(11): a, c, t, g, unknown or other
  modified_base (16)..(16): a, c, t, g, unknown or other
  modified_base (100)..(100): a, c, t, g, unknown or other
  modified_base (145)..(152): a, c, t, g, unknown or other
  modified_base (155)..(157): a, c, t, g, unknown or other
nnnnngacnnnagtcnaggctaagggcttttttaacctcgtatccgcgcctgcggtaacactgaatgagccattcggcctgttcttcagtgcatgggggntgctggtaccagtctgacttaaatgcgtgagaataccgctcgtgnnnnnnnncannn

SEQ ID NO: 583 - DNA, 243 bp, Escherichia coli
gtagcatcagagcagggctatcgggaatatatgtctaaatctggtaatatctggttttgacgcaaagcggacaaccacgctggctctaccctgcgccatgaaaatgtcaattcacatctgaactaatgctctttaatctagtaacgtctaaaatacctaacatttccttgataaaatgccagtacacgctgcatagcttcgctcttccggcactcgcgacagattatattcaggcgcctgtcg

SEQ ID NO: 584 - DNA, 49 bp, Escherichia coli
  modified_base (1)..(2): a, c, t, g, unknown or other
  modified_base (7)..(7): a, c, t, g, unknown or other
  modified_base (45)..(45): a, c, t, g, unknown or other
  modified_base (47)..(49): a, c, t, g, unknown or other
nncgtanttctccgtcaggtaatgaccagataaggtccggatcancnnn

SEQ ID NO: 585 - DNA, 10 bp, Escherichia coli
cacggcgaag

SEQ ID NO: 586 - DNA, 197 bp, Escherichia coli
  modified_base (177)..(177): a, c, t, g, unknown or other
  modified_base (179)..(185): a, c, t, g, unknown or other
  modified_base (189)..(197): a, c, t, g, unknown or other
gagactgaatccgatccgatgaacgtcacttttgacaagctggcccctgaagtacagaacgctgtcatggttaagttcgacacatgtgaaaacatcaccgttgatatggttattagcgcacaggaattgttgcaggaagacatggcaacattcgacggacatatcgttgaagcgttnannnnnnngccnnnnnnnnn

SEQ ID NO: 587 - DNA, 137 bp, Escherichia coli
  modified_base (1)..(1): a, c, t, g, unknown or other
  modified_base (3)..(3): a, c, t, g, unknown or other
  modified_base (16)..(16): a, c, t, g, unknown or other
  modified_base (29)..(29): a, c, t, g, unknown or other
  modified_base (39)..(40): a, c, t, g, unknown or other
  modified_base (67)..(67): a, c, t, g, unknown or other
  modified_base (93)..(93): a, c, t, g, unknown or other
  modified_base (96)..(100): a, c, t, g, unknown or other
  modified_base (104)..(106): a, c, t, g, unknown or other
  modified_base (108)..(110): a, c, t, g, unknown or other
  modified_base (113)..(117): a, c, t, g, unknown or other
  modified_base (120)..(122): a, c, t, g, unknown or other
  modified_base (125)..(127): a, c, t, g, unknown or other
  modified_base (129)..(133): a, c, t, g, unknown or other
  modified_base (135)..(137): a, c, t, g, unknown or other
ntnatcgacaacgacngcgaagactggangcgtatctcnncatcaatgcgcaaacagcctgatgccnttcgctacgaccgccagactattttnggnnnnntccnnnannntcnnnnngannntcnnnannnnncnnn

SEQ ID NO: 588 - DNA, 128 bp, Escherichia coli
  modified_base (1)..(1): a, c, t, g, unknown or other
  modified_base (17)..(17): a, c, t, g, unknown or other
  modified_base (21)..(21): a, c, t, g, unknown or other
  modified_base (25)..(25): a, c, t, g, unknown or other
  modified_base (98)..(102): a, c, t, g, unknown or other
  modified_base (110)..(112): a, c, t, g, unknown or other
  modified_base (115)..(115): a, c, t, g, unknown or other
  modified_base (117)..(119): a, c, t, g, unknown or other
  modified_base (122)..(128): a, c, t, g, unknown or other
ntaccgctgacgaagtnaacncaantatgcaggcagccaatatcagccagcctgacgccgataagttgcttgctgcatcacgtggtgaatttgttgannnnnttagtgannngantnnnccnnnnnnn

SEQ ID NO: 589 - DNA, 580 bp, Escherichia coli
  modified_base (1)..(1): a, c, t, g, unknown or other
  modified_base (10)..(16): a, c, t, g, unknown or other
  modified_base (577)..(580): a, c, t, g, unknown or other
naccagcagnnnnnnngaccatctaatgatcgaccttgaaaccatgggaaaaaatcctratgaccccgatyatctcaataggtgcaatatttttcgatccgcaaaccggagatatgggaccggaatttagtaagactatcgatctggaaactgctggcggagtcattgatcgtgacgtcattaaaaggtggcttaagcaatcacgcgaagcgcaatctgccattatgaccgatgaaatcccgttagatgatgcactgttacaattgcgggaatttatcgatgaaaactccggtgaattttttgttcaggtttggggaaatggagccaacttcgacaacacgattttgcgccgttcatacgaacggcaggagatcccctgcccgtggcgttactacaacgatcgcgatgtacgcacaatcgttgagctggggaaagccatagacttcgatgccagaacggctattccattcgaaggtgagcgccataatgcacttgatgacgcccgttaccaggcaaaatacgtttcagttatctggcaaaaactgatcccgagtcaggctgattcttaatgttcaannnn

SEQ ID NO: 590 - DNA, 1004 bp, Escherichia coli
atgattcagraaaaatatttcatgaaacactaacgctgcgccgagcgaatataactggaaatccataaattcaagcgcagtgcccagccatcccgatactgctgctttcaccaaatccttagtgcttctttcatgtttttctattgtcataatggttatctctaaaaaagaggtaagatgcgtactacttactcgccgttattggtattattcagaaaaagtgagtaagactttgcagcaatgtttttgatcctgttcaaataaactaatggcatcagcaacatgctggaaatcaaacgtatgggtaattaatttttctggtttaattaaccctttacttaaccagtcgataacaaccggaaatttatttgcatttaagcgtgaagagaaaatagagagttcttttccggtaattccttgctgaatcacttcagacggttcactggagaagcccatcaatacaatacgtgccgctggagaagccagcgttacggcctctttcaggatagaaggatgacaagccgcatcgataattaatgtcggcttgatgcctttttcagcgaaaatctcgccaagcggtgtctggctgttattaatcgccctgtctgccccgctctctttcgctttttccagtcgttcatcaatgcgatcggcaacaatcacatttttaacgttatagacgccttttaatacctgaacgatcgtcaggccgattggaccggcaccataaaccagaacggtatcattttcagtcggttgaccatgtccggttacgttagccgcaatggtaaaaggttcgatcatcaccgcatattgatcggccactgcttcaggaattttccacgcattttttgccggaaccacggcatattcactgaaaccaccgtcagcgtgcacacctaatacagcaagtgtcgtacaaacgttcggtttacctatagagcacggatagcaatgcccacagctgaccaccggatcgacagcaacacgttcaccgactctgg

SEQ ID NO: 591 - DNA, 868354 bp, Escherichia coli
  modified_base (868337)..(868338): a, c, t, g, unknown or other
  modified_base (868343)..(868354): a, c, t, g, unknown or other
caagtgtcgtacaaacgttcggtttacctatagagcacggatagcaatgcccacagctgaccaccggatcgacagcaacacgttcaccgactctggcgctttccacgccgtcacccaccgcatcaatgacgccaaagaattcatgtccaatgacgcgcggatatttcgcaaaaggattatgcccacgataaatatggctatcagaaccacaaattccggcaagtttcacttttactcgtacttcacccgctgacggggtgggtatttcacgttcgacaatcgccagttgattcggtttttcaattaatatgcttttcattatcttactccttaccagttccacagcgtgccatcttccagacgtgcgactggtagataagcaggttcatagggatatttcgccgccagcttttcatcgaattcgatgccaagacccggtttgtctcccggatgcatatagccgttatcgaaagtccagttgtgcgggaagacttcgagcatttgttcggaataacccatgtattcctggacaccgaaattggggacccacagatcaaagtgcagcgctgcagccatgcagactggtgacaaatcggaaggaccgtgtgagccagtacgtacctgatacagcgaagcaaaatcggcaatccggcgcataccggtaattccgcctgcatgggtcagcgtggtgcggatataatcgatgagttgctcttcaatcagttgtttgcagtcccagatgctgttgaagacttcacccactgcgatgggtgtgacggtatgttggcgaatgagacggaagcattcctggttttctgcaggcgtcgggtcttccatccagaacatgcgataatcttcaatgcttttaccaaagcgcgccgcttcaataggcgttaagcgatggtgcatgtcatgcagcaaatgttcattaaaaccaaacttgttacgtaccgcgtcaaacaatttcggcatgaaatcgaggtatttctccgtcgaccacagctgctcttccggccactgtcctttggttgcgggttcataagccagacctttacctttcgacatgccgtaggtggttttcataccagggattccgcactgcacgcggatggctttgaatcccagctcctgatgacgggcataatcatccagagcttcatcaatactgtgaccggtggtatggcaataaaccatcaccccttcacgagacgcgccgccgagtaactggtaaagcggcatgttggcagctttggctttaatatcccacagcgccatatcaaccgctgaaatggccgacatcgtaaccggaccgcgacgccagtaagcacctttatagaaaaactgccagatatcttcgatacggtgcgcatcgcgaccaataagctgcggacaaaggtgatcctgcaaataagaggccacggaaagctcacgtccattgagggtggcatccccaaggcccgtaataccgtcctcagtggtgatttttaatgtgacgaaattacgccccggacaggtaacaaaaacttcagcctttacgatcttcatgttcgattccttgcatcgcttgtcgtgatgcatgaaatctacgcaactgagctactaccatacaagtatgaagatcgaaaaaagccggagtgatcacaaaaaaaggcgtatatttgcgctgtgaatggttgacaaaagatgaaatagaataccttttgtcagctgacacttcctcttatcttattgataaaatggatttatgttcctacgtgcgccccagcccgcaacaatgatcaacatgccgcaaagcgcaatcaacgcacccgtccagtcataaagagtcagtttcacgccatccacaacgcgcagccacatcaacgccgtgcagacataaacgccaccataagccgcgtaaacacgcccactcgccgctggatgcaacgttaacaaccagacaaacagcgccagtgaaatccccgccggaagcaacagccagatactggcgtttcgttttaaccacaaccagggcagaaagcatccaataatttcacacagcgcagtagcaaaaaatagtaacgttgttttaatcatctttgtcacttattgacatcatgtatagttatagggcgacataatatcatcaatataaacaccctcctggtacgttttgcgttcgcagtggatggtgtagaatctcctttaatcattcatacagggaatgaattatgaaaatcactctcagcaaacgaatcggcctgctcgcttttctgctgccttgcgcactggcactgagcacaactgttcatgccgaaactaacaaactggtgattgagtctggcgacagtgcacaaagccgccagcacgccgctatggaaaaagagcaatggaatgacacgcgcaatctgcgtcagaaagtgaataaacgcactgaaaaagagtgggataaagccgacgccgcttttgataaccgcgataaatgtgagcaaagcgccaacatcaatgcctactgggagccaaatactttgcgctgcctggaccgtcgaactggccgcgttattaccccctaacctgttattgatttaaggaatgtaaggacacgttatgccaagcgcccacagtgttaagctacgcccgctggagcgtgaagatttacgctatgtacatcaactcgacaataacgccagtgtgatgcgttactggtttgaggaaccctacgaagcctttgttgaactctctgatctgtatgataagcatattcacgatcagagcgaacgacgctttgtggtggaatgtgacggcgaaaaagccggtctggtggagctggtggaaattaaccatgtacatcgccgggcagaatttcagataattatctccccggagtatcaggggaaaggtctggcaacccgtgccgccaaattagcaatggactatggcttcaccgttctcaatctctataagctgtatctgatcgtcgataaagagaatgaaaaagcgattcacatttaccgcaagcttggctttacggttgaaggtgaattgatgcacgagttctttattaatggtcaatatcgtaatgccattcgcatgtgtatattccagcatcagtatctggcagagcacaaaacaccgggtcagactctcctgaagccgaccgcacaatagcattaataataatcgatcgtatttttgatggtgtaaacccgttcgacggcgggttttactccttcatcaacaatgatcagctgacagtccaccggattggcgtgactgtcatattcacagctctgttttacattaccaactcgttgattattcagtaaagtaaccgctgtgtaatctaattttttgatcggatccgttgatggcgtggcgctgacagataatgttttgtcgttacttttcgtggttttacccagcggataaccctgatcatcatagcgatattccatctgcatttgtttgctgctggctttaatcacgaagccattatcatcggtttcccaactcaccccggcagaaggtaattctgctagctggcattttccctgtaaacgtactctcttctccagcgtctcggcatcacggtaataattggcgtccagtaccagagcgaccacggtattattttccagatccagtaattcgagtgaatcaaaacagccttcttccgacaaagtcccagaaacacgtttcgtcacttcaccttgctcatccattaatgtctgagtgaaatcttttaccggaccacgcagcggatcaaaatcgaattcattagagaaactggccatctcaggggtaaatgaaagtgttacctctgtgcggtcacatcctgtgaggaatatcgcgagtaagcatggtagtaatttgtatttcacaacagtcaccagagagtagagatgattctcaatcatagtagcaaatacagtactttacacgttaaatgctatgcttaaagaagttatcttcgcgtaaggagcttatgatgaaactctcaacctgctgtgccgcgcttctgctcgccctcgcctcacccgcggtactcgccgcgccgggatcctgtgagcgcatacagagcgatatatcacagcgcattatcaataatggcgtacccgaaagcagcttcacgttaagtattgtacccaatgaccaggttgatcagcctgattcccaggtcgtcgggcattgtgctaatgatacgcataaaattctctacacccgcaccaccagcggtaacgtctctgctcccgcgcagtctacccaggatggcgcgcctgccgaaccgcagtaatacattatcgacggaacgccggatacgacacatccggcgatttgaacatacaacataatcccaccttattactcatacccttctattgatatggattaataattcttaacccaaaatgggtagactccctctattgttagcgcgctaaatattcaatatataaacatttatataacgataaagaacagggagtgagttatgtccaaaaatgaccgaatggtgggcatcagccgcagaacactcgttaaatcaaccgcgataggttctctggcgctggctgcaggcggtttttctttaccgttcaccctgcgcagtgcagcggcagcggtacaacaggccagcgaaaaagtgatctggggtgcctgttccgtcaactgtggtagccgctgtgcacttcgtctacatgttaaagataatgaagtgacctgggtggaaactgacaataccggcagcgatgagtacggcaaccatcaggtacgcgcctgtttgcgcggtcgctccatccgccggcgtattaatcatcccgatcgcttgaattacccaatgaaacgcgtgggtacacgcggtgaaggcaaattcgaacggattagctgggatgaagccctggatactatcgccagtagcctgaaaaaaaccgtcgaacaatatggcaatgaggctgtatatattcagtactcttcggggattgttggcggcaatatgacccgctcttcgccatcagcctcggcggtcaaacgcctgatgaactgctacggcggttcactcaatcagtatggctcctacagcaccgcgcaaatttcctgtgccatgccctacacctacggcagtaatgatggcaacagcaccacggatattgaaaacagcaagctggtcgtgatgtttggtaacaacccggcagaaacccgcatgagcggcggtggcatcacttatcttcttgaaaaagcgcgcgagaaatcgaacgccaaaatgattgttatcgatccgcgatataccgatacggctgctggtcgtgaagatgaatggctccctattcgcccgggcaccgatgccgcgctggttgcgggtattgcctgggtattgattaacgaaaatctcgttgatcaaccttttctcgataaatactgcgtcggctatgacgaaaaaaccttacccgcagatgcacccaaaaatggtcactataaagcctatattcttggtgaaggtgatgataacacagcgaaaacgccgcagtgggcttcgcaaattaccggtatcccggtagaccgtatcatcaaactggcgcgtgaaattggcacagcaaaacccgcttatatctgccagggctgggggccgcaacgccaggcaaacggcgaactgactgcacgcgctattgctatgttacctattttgacgggcaatgtcggcatcagcggcggaaatagtggcgcgcgtgaatcgacctataccattaccatagaacgcctgccggtgctggataatccggtcaaaacgtcaatctcctgcttcagctggacagatgctatcgatcatggtccgcaaatgacggcaatccgcgacggcgtccgcggcaaagataaactggatgtgtccattaagttcatctggaactacgcgggaaataccctcgttaatcagcattctgacatcaacaaaacgcatgaaattctgcaagacgaatcgaaatgcgaaatgattgtggtcatcgaaaactttatgacctcatcggcaaaatatgccgacattctgctgccagacctgatgaccgttgagcaggaagatattattcctaacgactacgccggtaacatgggatatctcattttcctccagccagtcaccagcgaaaaattcgaacgtaaaccgatttactggatcctgagtgaagtcgcgaaacgtcttggacctgacgtctatcaaaagttcactgaaggtcgcacgcaggaacaatggttacaacatctgtacgccaaaatgcttgccaaagatccggcgttaccgtcttacgacgaactgaaaaaaatgggtatctataagcgtaaagatcccaatggtcattttgtcgcctacaaagcatttcgtgacgaccccgaggcaaatccacttaaaacaccttccggtaagattgaaatttattccagcaagctggcggaaattgcccgtacctgggaactggaaaaagatgaagtgataagcccactgccagtttatgcctctacctttgaaggctgggactcccctgaacgtagaaccttcccacttcaactgtttggtttccattacaaatcccgtactcactcgacctacggcaatattgatctcctgaaggctgcctgccgtcaggaggtgtggatcaaccctatagatgcgcagaaacgtgggattgccaacggcgatatggtgcgggtgtttaaccatcgtggcgaagttcggctaccagccaaagtgacaccacgcattctccctggggttagcgctatgggccagggagcctggcacgaggccaatatgtctggcgataaaatcgaccatggcggctgtgtgaatacgctaaccactctgcgcccttcaccactggcgaagggaaacccgcagcacactaatctggtcgagatcgaaaaaatataacccacgacaaccataaattctggcatgacattttgtttgaaaagcaataagtgagtaatgatgaaaatccataccacagaggcgctcatgaaggctgaaatcagccgtagaagtctgatgaaaacctccgcacttggcagtcttgcgctggcaagcagtgctttcactctgccattttctcaaatggtccgggcggcagaggctccggtagaagagaaagcggtctggagttcctgcaccgttaactgcgggagccgctgtctgttacgtttgcatgtgaaagatgacaccgtgtactgggtggagtctgatacgacaggtgacgacgtctacggtaatcatcaggttcgcgcgtgtttacgcgggcgctctatccgccgacggatgaatcatcctgataggttgaaatatcccatgaagcgcgtcggcaagcgcggtgaaggtaaatttgaacggataagttgggacgaagccctggataccatcagtgataatcttcggcggatcctaaaagattacggcaatgaggctgtacatgtcctgtacggaacaggcgtagatggcggaaacatcaccaactcaaacgtcccgtaccgtctgatgaactcttgcggtggttttctcagtcgctatggcagctacagtaccgcacagatcagtgccgcaatgagttatatgttcggtgccaatgatggcaacagcccggatgatatcgccaatacgaaactggtcgttatgttcggaaataacccggcagaaacgcggatgagcggcggtggtgtcacttactacgtcgagcaagcccgcgaacgttcaaacgcacgcatgatcgtcatcgatccacgttataacgacacagctgccgggcgtgaagatgaatggctgcccattcgcccaggcaccgatggcgcactggcctgtgcgattgcctgggtactgattactgaaaacatggtcgatcagccatttctcgacaaatattgtgttggttacgatgaaaaaactctgcccgccaacgcaccacgtaacgcgcattataaagcctatattctgggcgaagggcctgacggcatagctaaaacgccggaatgggcagcaaaaatcaccagcatcccggcagaaaaaattatccagttggcacgagagatcggttcagcaaaacctgcttatatttgtcagggttgggggccacaacgacattccaacggcgagcaaacgtcccgcgctattgccatgctttccgttctcaccggtaacgtcggcataaacggcggcaactcaggtgtacgcgaaggtagctgggatctgggggtagaatggttcccgatgcttgagaaccctgttaaaacgcagatttccgtctttacatggacagatgccatcgaccatggtaaggaaatgaccgcgacccgtgatggtgttcgtggaaaagaaaaactggatgtccccatcaagtttttatggtgctacgccagtaacacattgatcaatcaacatggcgacatcaatcacacccatgaggtgcttcaggatgacagcaagtgcgagatgattgttggcattgaccacttcatgacggcctcggctaagtattgcgatatcctgttgcccgacctgatgccaacagagcaagaagaccttatctctcatgaatctgcagggaatatgggctatgtgatcctcgcccaacccgcaacctctgcaaaatttgaacgcaaacccatctactggatgctgagtgaagtcgccaaacgcttaggaccagacgtttatcaaacctttactgaaggtcgcagtcagcatgaatggatcaaatatctccatgcgaaaacgaaggaacgtaaccctgagatgcccgactacgaggagatgaaaacgaccgggatctttaagaaaaaatgcccggaagaacactacgtcgctttccgcgcattccgtgaagatccccaggcaaacccgttgaaaacaccttcggggaaaatcgaaatttattctgaacgactggcgaagattgcggatacctgggaattgaaaaaagatgaaattattcatccccttccagcttatacgccaggttttgatggctgggacgatcccctgcggaaaacctatccactgcagttaacgggcttccactacaaggcgcgtacccactccagctacggcaatattgatgtgttacagcaggcctgcccacaagaggtgtggatcaaccccattgatgctcaggctcgcggtatccgtcatggcgataccgtgcgggtatttaacaataatggagaaatgctgattgccgcaaaagtgactccgcgtattctgcctggcgttaccgccatcgggcaaggtgcgtggcttaaagcggatatgtttggtgaccgggtcgatcacggcggcagtatcaatattctgacctctcaccgcccttcaccgctggcaaagggaaacccgtcgcacagcaatcttgtccagatcgaaaaggtttaaggagtagcccatgaccacacaatatggattttttatcgattccagccgctgtactggctgtaaaacctgcgaactggcgtgcaaagattttaaagttcttggcccggaagtcagtttccgccgtatttatgaatacgctggcggcgactggcaggaagataatggcgtctggcaccagaacgtgttcgcttattatctctccatctcctgtaaccattgcgatgaccccgcatgtacaaaagtctgccccagcggcgcaatgcataagcgtgaagatggctttgtggtggttgatgaagatgtttgtatcggctgccgctactgccacatggcttgtccgtacggcgcaccacagtacaatgctgaaaaagggcacatgacgaagtgcgatggttgttattcgcgcgtcgccgaggggaaacaacccatatgcgtcgaatcctgcccgctgcgtgcacttgagttcggtccaattgaagagctgcgccagaagcacggcactctggctgccgtcgcgccactgccgcgcgcgcatttcacaaaacccaatatcgttatcaaacctaacgccaacagccgcccgaccggcgataccactggttatctggctaatccggaggaagtgtaaaatgggaaatggatggcatgaatggccactggttatctttaccgtattgggtcaatgcgtagtaggcgcgctgattgttagcggaattggctggttcgccgccaaaaatgacgcagaccgtcagcgtattgtccgtggcatgtttttcctctggctgttgatgggcatcgggtttattgcctctgtcatgcacctgggatcgccactgcgagcgtttaactcgctgaatcgaatcggagcttctggtctgagtaacgagattgctgccggttccatattttttgccgttggcggactatggtggctggtggcggtcatcggtaaaatgccgcaagcgttggggaaactctggttacttgtcagcatggcgctcggcgtcattttcgtctggatgatgacctgcgtgtatcaaatcgacaccgtgccaacctggcataacggttacactacgctggctttcttcctgacggtattgttgagcggtccaatacttgctgccgcaattctgcgggcagctcgcgttacatttaataccacaccatttgccatcattagcgttctggcgctgatcgcttgtgccggggtgattgtgctgcaaggtttgtctctggcgtctattcactcatccgtgcaacaagccagcgcactggtaccagattacgcctccttacaggtctggcgtgtggtattgttatgcgcaggtcttggatgctggctttgcccgctcattcgtcgccgtgaacctcacgttgccggacttattctggggctaatcctcatacttggcggtgagatgatcgggcgtgtgctcttttatggcctgcacatgacagtaggaatggctattgcaggttaacaaatcggtgcggggcaacccgcacatttcaggatgttaggaatgacccatttttcacagcaagataatttttctgtcgcggcgcgcgtgttgggcgcgctgttttattacgctccagagagtgcggaagccgcacctctggttgcggtactcaccagtgacggctgggaaactcagtggcctctaccagaagcgtcattagcgccgctggtgacggcttttcagacacagtgtgaagagactcacgcccaggcctggcagcgtttgtttgtcggcccgtgggcactgccgtctccgccgtgggggtcggtctggctggatcgcgaatctgtgctgtttggcgattcaacattggcacttcgtcagtggatgcgcgagaaaggcattcagtttgaaatgaagcaaaacgaaccggaagatcattttggttcactgctgttgatggctgcgtggttggcggaaaatggtcgccagacagaatgcgaagaattgctggcatggcacctttttccgtggtcaacacgttttcttgatgtttttatcgaaaaagcagaacaccctttctaccgtgcactgggtgaactggctcgcttaacgctggcgcaatggcaatcacaactgttaattcctgtcgcggttaaaccgctgtttcgataggatcaccgtaatattgccggatggtgacgattacgcgcaatccggcaataataggttacagtgtcacgtttttttatctcttaaagcacgcactgcttttgcggctggcctcttttgccgcaaaatagtcgcccgtgtttcattgcacatttctgctcatgcatcatctacacatctatccggatctgcgcactatgttccgccgtctgcttatcgcaacagtcgtcggtattctcgcggcctttgccgttgccgggtttcgtcatgcgatgctgctactggagtggttgttcctcaataatgactccggcagtctggtcaatgcagcgacaaacctttccccctggcgacggttgctaactccggcgctcggcggactggcggcgggtttgttgctgatgggctggcagaaatttacccaacaacgccctcatgcgccgaccgattacatggaagcgttgcaaaccgatggacagttcgattacgcagcaagcctggttaaatcgcttgcctcgctgctggtagtaaccagcggcagtgcaattggtcgcgaaggtgcgatgattcttttagctgcccttgccgcctcctgttttgcccaacgttttacgccacgccaggagtggaaattatggatcgcctgtggggccgcggcgggaatggctgcggcctatcgtgccccgcttgctggcagtttatttatagccgaagtgctgtttggcactatgatgttggcctctctcggcccggtgattatttccgccgtcgtggcattgctggttagcaatctgattaatcatagcgacgcgttactctacaacgtacaactctcagtgacggttcaggctcgtgactatgcgctgattatcagtacaggtgtgctggcaggtctgtgcggaccactgttgttaacgttaatgaacgcctgtcatcgtggatttgtgagtctcaaacttgcgccgccctggcaactggcactaggcgggttgatcgtgggtctgctttccctgttcacacctgcagtgtggggcaacggctatagcaccgtacaatcctttttaaccgccccaccactgttaatgatcattgccgggatcttcctttgtaaactgtgtgccgtgctggcgagtagcggttccggcgcacccggtggtgtctttacaccgacgctatttatcggtcttgccattggcatgttgtatggtcgtagcctgggattatggttccctgatggcgaagaaattacacttttactcggattgaccgggatggcgacactgttggcggcgaccacgcacgcgccgattatgtcgacgttgatgatatgtgaaatgaccggggagtatcagctactccccggtttattgattgcctgcgtaattgcgtaggtaatttcgcggacgttacaccgtgactctatctaccgccagcacactgcgcagcatagctaagcggatgtattgccccagttcacgctgttcggcgcgcggcagataaggcagttcaccaatgagcggtgccggaagttttttacccagcacatcaatgatttccgcataatgcgccagtcctgggttgattcggttagccacccagccaatgagcggcagcccgtcgttggcgatcgcctgagctgttagcagtgcatggttaatgcaaccttcctgaataccgacaaccatcaacaccggcagttgttcctgcactacccattcagagagtggacgcaaatcattcatcagactgcgccagccgccagtcccttctaccacgacatgatcgactttttcggtcaggtttgccaggccgtttgaaatgagggtgtaattgattgggcaactgtgcgccacgctactttcttcttcgcttaacgcgataggattaactgcttcataaggcagttcgatggttgaaacactctgcaacaccagggcatctttattacgcagcccttcgggtgtctctttgctccccttcgctacgggtttatatcccgcaaccgtttttccctgggaggctaacgcttgtagcaatgcgcgggaaaccaccgttttccctacagaagtgtctgtaccggtaataaagaaacgcttcagcatcactaactccaccgttatgcttcacaaatataaaccaggaaaataattaaccttgaaagtctaagttatgctttcctggcccaaattgagatagcgcaaattttggtagaacagttaaaaaatgttaaccctgcaacagacgaatcaacaaagaaccgttatacatcgcgtcttttaccagtgcagcccctgccatcgtgccctggttagaaaactgagtactctcaacgctgatgtgctgactatacgcaggaagggcctgctgacggatgctgtctgagatgaccgggaagaggatatctgccgctttacttaacggtgagccaatcagtattttttgtgggttaaataaattcaccatgatggcaagaatgcgccctacatgcgcgcccaccccggtaatgatgtcttttgccagcagatcgccgcgcaatgccgcctgacacaatgagtccacggttaacggttgtccatgtaacatcgagctcatggattgattaagacgcagctgtgccagctcaagaatactgtccacactggcgatggtttcgaggcagccgtgattcccgcaataacagcgtttcccatacgggtcgacctgtgtgtggcctatttccacgagactactgctgcctgcgtgtagcagatgaccatcggtaatgacgcccgcccccacgttgtgatcgataaccacctgaatcacatcgcgcgccccgcgtgaggcaccaaacaaggcctctgccatcgtccatgcgctgatatcatgctgaatataaaccggtacgccggtatgctgctccagcgcctcgccgagcggcatctcttttacatcctcgtagaacggcatgcgatgtacaataccattttccgtatcaataattcccggcaaggttatggcaatcgaagttagacgctcaagttttttctggtggcgaataaaaaactgatcgatatgggaaatgatacgatccagcaatggcgagtcatcttttaacgccagttcctgcgactcttccaccaccagtttgctgctcagatcgcgcagagcaaggaaaatctccccgcgactaatgcgcagagaaagatagtgccaggcttcagtttcaaccaccagccccaccgccggacggccacggttccccgcttctttgatttccagctcttgcaccaggtgtgcttcgagcatctcacggacaattttagtgatactggcaggagccagctgcgccagacgggaaagatcgatacgcgagactggaccaagctgatcaatcaggcgataaaccgcgcccgcgttggtctgctttatttgatcaatgtgcccaggctggttttcagcaaccaccgcatactccctatattttcgcgctccgaaataatctgtaggctatggtgaagcacttcaatacgtgtcgtcaaatttttacttaggcatgtgattaacagcacatttttcgggctttttcgctgaaatttccctcacctgagagcattcagcagatgaatacgaaagtttcgcgcagctggactttgttcatgatgtttcggccagaccaaccacatttcagaaaccgcatcctcttctgcaatcggcacccagcgcatttcgttgagctgaacacgtttaaatgacgcaggcaaaattgaaacaccctgaccggcggaaaccagaccgatgatggtcattgcctcgcccacctcctgagtgatgacgggcgtcaaatggtaacgtcgcatcagcccgagaatatcgtcatacagccctgtcccgacgtgcggatcaaaaaagacgaagggttctttcgccagttcagccagcgttacattcgggttatttgccaggggatgatcgtgcgggatcatcgccataagcggttcatggacgatgactgcgtgttcaagcgtctccggtaacgctgtgttacgcagcaatcccatatccagcgttccttcaatgagcggagcgatttgctcacgagtgttcatttcgcgggtttgtaaatggacatcgggataatcacggcgaaacagcgataacgtatcagacaccgcccgaataaaaggagcggacgaagtaaaaccaatgcgcaactcccccgcttcaccctgatgcagtctttcagcgcgagcggcagcgtcatccaccatagacaggatttgccgactatctgcaagaaactgttttcctgctgccgtcagcaatacactgcgattggttcgtgccagcagtcgggcaccaatttgttgctccagcgcctgaatctgctgacttagcggcggttgcgaaatattcaggcgggcagcggcgcgcccgaaatgcagctcttccgcaacagcaacaaagtaacgcagatgacgaagttcaatattcatatttaaaacatcttatttgagattattaatatattagacagaacaattcgattttcctaacctatgtataagcctgatccacaggcatatttagcaaggatttcaagtgagccgtactacaactgttgatgacgctccggcaagcgacactgacaagcaaagcatttctcagccaaatcaatttattaaacgcggtacgccgcaatttatgcgcgtcaccctggcgctgttctctgccggactggcaacatttgcacttctctattgtgtgcagcctatccttccggtgctttcgcaggagtttggcttaacgcccgcgaacagtagtatttcactgtccatttccacggcgatgttggctattggtttgctgtttactggccccctatccgatgccattggtcgcaaaccagtgatggtcacggcgctactgttggcctccatttgtacgttactttcgacaatgatgaccagctggcacggcattttgattatgcgcgccttgattgggctttcgttaagtggcgtggcagctgttggcatgacttatcttagcgaggaaatccaccccagtttcgtggccttttcgatggggttgtatatcagcggcaactcaattggcggcatgagcggacgcttaattagtggtgtcttcacggactttttcaactggcgaattgctctggcggcaatcggttgtttcgcgctggcctcggcgttgatgttctggaaaatccttccggaatcacgccattttcgcccgacttcgctgcgccctaagacgttatttatcaactttcgtctgcactggcgtgaccggggattaccgttattgttcgcagaaggctttttgctgatggggtcgttcgtcacgctgtttaattacatcggatatcggttgatgctctccccctggcatgtcagtcaggccgtggttggcttattatcgctggcttatttgaccggtacatggagctcacccaaagccggaaccatgaccacccgctacgggcgcggtccggtgatgttgttttcgacgggggttatgctgtttggtttactgatgaccttattcagctcgctgtggctgatctttgccggaatgttactcttctcagcaggattcttcgcagcccactcagttgccagcagctggattggcccccgcgcaaaacgcgctaaaggccaggcctcctcgctgtatctgttcagttactatctggggtcgagtattgccgggacgctgggtggtgttttctggcataactatggctggaacggcgtcggcgcatttattgctctgatgctggtcattgctctgctggtcgggacgcgtttgcatcgtcgtctgcacgcctgaaaaataagcccggactgcggtaactacacgtccggacttattgcttgctcaaaccaacgttaatagccatcctaaaatagacgaagcgccagccaattcccgcagcgcgtctagcgtcatcaggattataagtacccaaataaacggattcattttgctgtgtgtcatttattactgatgtgcagttattctaccgctttgtaagtagtaaaatagttaacccgatcaagactactattattggtagctaaatttcccttaagtcacaatacgttattatcaacgctgtaatttattcagcgtttgtacatatcgttacacgctgaaaccaaccactcacggaagtctgccattcccagggatatagttatttcaacggccccgcagtggggttaaatgaaaaaacaaattgagggtatgacaatgaaaaaagtattagctctggttgttgccgctgctatgggtctgtcttctgccgcctttgctgcagagactgcgaccacacctgctccgactgcgacgaccaccaaagcagcgccggcgaaaacgacacatcataaaaaacagcataaagcagcacctgcccagaaagcgcaggcggctaaaaagcatcataaaaatacgaaagctgaacagaaagcccctgaacaaaaagcgcaggcagcgaagaaacacgccgggaaacacagccatcagcaaccggcaaaacctgctgcacaacccgcagcgtaagttttcaacagtaatgctggcgcgccccctcgcgcctgaaaattacggtgctaagcgggtaacgtttagcaccgcctttagcggagggtagtatggtgggccgttatcgctttgagttcattcttatcatccttattttatgcgcactgattgccgcccgtttttatctttcctgactgtagttatctgattttactcccactttcatcccgtcccgtctatagtatttatgagggtttgcttttaataatcataattacccaccagagtgtgatatgcgtacaaccattgctgtagtgttgggtgcaattagtttgacgtctgcttttgtgtttgcagataaaccagacgttgccaaatcggcaaacgatgaggtcagcaccctgttttttggtcatgatgatcgtgtgccagtgaatgacacgacccaatcaccgtgggatgcggttgggcaactggaaacggccagcggcaatttatgtacggcgacgctgattgcacccaatctggcattaacggcaggacactgtttattgacacctccaaagggtaaagccgataaagcagtggcgctgcgttttgtgtcaaataaaggtctttggcgctatgacatccacgacatagaaggccgcgttgatccgacactgggaaagcggttaaaagcagatggggatggttggattgtacctcccgcagccgcgccgtgggacttcggattgattgtgctacgtaatcccccttctggcattacaccgttgccgttatttgagggagataaagccgcgcttactgccgcattaaaatcggctggccgtaaagtaactcaggcgggataccctgaagatcatctcgatacgttgtacagtcatcaaaactgtgaagtgactggctgggcgcaaacgtcggtgatgtcacatcagtgcgataccttgccgggtgacagcggttcgcctctgatgttgcataccaatgacggctggcaattaattggggtgcaaagttcggctcctgccgcgaaagatcgctggcgcgccgataaccgggccatttctgttaccggttttcgcgacaagctggatcaactgtcgcaaaaataatgttcaaacgctgcccgactgtgcgggcagcgtcttcatcaggcaagtttcaccatgatcattccagccaacagcaagaccaggccaatccagcctttacgatttaaccgttgaccaaacaagatccaacctgcggctaacgtggcggcaataccaaacccgccccacaatgcataagcgacagacaagtcgatcccttttacggcctgagaaagcgcactaaaggcagccagcaccgccgccagggagagcaagccaaatattttgcgacgaaagccgtcagaaaatttcaaaaagacgttagcaacgatttccagcacgattgccaatgccagccaggcggcgtgaacccattcaaactgcgccatggttcacctccagttcaggtttacgcgctttacgggtacctgatttgatcaacacaatcccggcgaccagggtggttaacccggcaattttcatcagcgataaactttcgtcgaataacaaaacgctaaacaaggtaataaataaaataccgataccttcccacagcgcataagctacgcctaaggcgatctttttaacggcgaaagagagaaatatatacgacagagaaatcatcaccagcattaaaataaagccgccatttccctcactgacgctcgcccatttcattgacagcgtaccggtaatttctgtagcaatagccaggcctaataaaatccaataaatatacattgtccttctcctgcaagagaattattttaattttcgcttaattcagcgaaaccaaagtaaagtggtcaagccccgcgcatagggcaagcttaggcagaagaaaggactaaagcgcgttgcgccagtgctgctcacctacgagcaagatagtggatgaggtacgaagatgggtaaatgttgaaaataacgtcctgaacaaattgtccataatattacaattatccgcagtgttgcttctcgtcatcgcggatgataattgtcctcggtagttgaacacgcctgatttgtatcatagcttaagaattaactcaaaatattttcacttctttacctgagcggtttgattttcgttatgatgacggagcgaaaaagacattattattagcaaaggaagaaaaaacggggacaagcatggcaaagccgatcatcacgctcaatggcctaaaaatcgtcattatgttgggaatgctggtcattattctctgcggtatccgttttgccgccgagatcatcgtgccgtttattctcgcattatttattgctgttattcttaacccgctggtgcaacacatggtccgctggcgagtgccgcgtgtactggcggtgtcgattttgatgaccatcatcgtgatggcgatggtgttgctattagcttatctgggttccgcgctcaacgagttgacgcggacgttaccgcaatatcgcaactctattatgacgccgctgcaagctcttgagccgttgttgcaacgcgtagggattgacgtctcagttgaccagctggcgcattacattgatccgaacgcggcgatgacgttgctcaccaacttattgacgcagttatctaatgccatgtcatcaatatttttattgctgctgacggtgctgtttatgctgctcgaagtgccacaattgcccggaaaatttcagcaaatgatggcgtgtccggttgaagggatggcggcgattcaacgtgcaattgacagtgtttctcattatctggtgctaaaaacagccatcagcatcatcaccggcctggtcgcctgggcgatgctcgccgcactcgatgttcgcttcgcttttgtctggggattgctggcctttgcgcttaattacatccctaatattggttcagttctcgcggcaatcccccctatcgctcaggtactggtgtttaatggcttctacgaagcgttgctggtgctggcgggatatctgctgattaatctggtcttcggcaatattctggagccgcgcatcatgggacgtgggctggggctttccacattggtggtatttttgtcgttgattttttggggatggttgttaggaccggtgggtatgctgctttccgtgccgttaacaattattgtcaaaattgcgcttgaacaaacagcgggaggtcaaagcatcgccgttctgttaagcgatctcaataaagagtgacggcctccgcagaggccgtcagggttacagagctttcaggattgcatccacgctggctttggcgtcaccaaacagcatgtgggtgttttccttgaagaacagcgggttttgcacaccagcatagccagtgttcatcgaacgtttaaagacaatcacgttctgcgctttccacacttccagcacaggcataccagcaataggactcttcggatcatcctgcgccgccgggttaaccgtatcgttagcaccaatcaccagtacggtatcggtatcagcaaagtcatcgttgatctcgtccatttccagcacgatgtcatacggtacttttgcttcagccagcaatacgttcatatgtccaggcaaacgccccgcaaccgggtggataccgaaacgcacgttgataccacgagcgcgcagtttctcggtaatttcagcgacaggatattgcgcctgcgcgactgccatgccgtaccccggagtaatgatcactgaatgggagtttttcagcagttccgctgtctcttctgcggtgatttcgcggtgctcgcccacttcctgatcatcgccagtagaagagccgtcggtgccgaaaccacccgcaataacgctgataaaggaacggttcatcgccttacacataatgtaagaaaggatagcgcccgaagaaccgaccagcgcaccggtcacaatcagcaggtcgttgctgagcataaagcccgcagccgcagccgcccagccggagtacgagttcagcatcgacaccaccactggcatatctgcaccaccgatggaggcgactaaatgccagccgaataccagcgcaatggcggtcattatcagcaatgccagcacttgcaggccgacgctatccgtgcgaacaaatacaatcagcagcaggaaggaaacgaccagagccgccaggttcattttgtgacggtttggcagcatcaacggtttagacgaaatcttgccacacagtttgccgaacgccaccaccgaacccgtgaacgttaccgccccgatgaagataccgaggaacacttccgtcaggtgaatattgaccagaatcggtgccattcccgcgtcatgatgcagataactgttaaagccaaccagcactgccgccagacccacgaagctatgcaggatcgccaccagttctggcatttcggtcatttcaactttcttcgccagacggataccaattgccccaccaatgaccatcgccagcaagatccagccaacattacccgtatccggtccaaaaatggttgcgattaacgcaatcgccatcccggcgataccgaagttgttaccctggcgagacgtttcatgtttcgaaagaccggccagactgaagataaacaggatcgcggcaacaatgtatgcagctgtaactaatcctccagacatatgttaccccttaatttttgcggaacattttcagcatgcgctgagtcacggtgaagccaccgaaaatattaatgctggctataagcaccgcgataaaactaaggaagctaacccagccgccctggccaatctgcaacagtgctccgacaacaataatccctgaaatcgcgttggtgaccgacatcaacggtgtatgcagcgcatgcgatacattccacaccacgtaataaccgacaacgcaggccagcgcgaaaacggtgaagtgcccaagaaactctttcggcgcaacgcttgccagccaaccgaaaaggatgattgccagcgccatcaatgcgtatttacgccacggtgagcaggcacatttttcctcagttttcacttccggtgccgctttttgtgccgcctgcggctgagctgatacctgaatcggcggtgccggccaggtaatttcgcccgcacggatcacggtcacgccgcgaatcaccacatcatcaaaatcaacagtgatattgccgtctttctctttgcacaacagtttcagcagattaacgaggttagtaccgtaaagctgtgaggattgcgtcggcagacggcccggaagatcggtataaccaatcactttgacaccattttccgtagtgaagatttcacccggcacggtgtattcacagttgccaccgttttgggctgccaggtcgacaatcacactgcccgccttcatggagtcaaccatttcacgggtaattagcttcggcgctggtttgcctggaataagcgcggtggtgacaatgatatcgacctcttttgcctgggcggcaaagagttccatttccgctttgatgaacgcgtccgacatcactttggcatagccatcgccgctgcccgcttcctctttaaaatccagctcgaggaattccgcgcccatactttgaacttgttctttcacttccgggcgggtgtcgaatgcacgcacaatcgcgccgagactgtttgctgcgccaatggcggccagacctgcaacacccgcaccaatcaccatcacttttgccggtggcactttcccggccgcagtaatttgcccggtaaagaagcgcccaaattcatgtgccgcttcaacaatggcgcgataaccggcgatgttcgccatcgagcttagtgcgtccagcgattgtgcgcgtgagatacgcggcacagaatccatcgccatcacggtcacgttacgttccgcaagtttttgcattaattccggattctgcgcaggccagataaaactcaccagcgttgtcccaggattcagtaacgcaatttcatcatctaacggcgcattgaccttcagaatgatctctgactgccagacgctattcccttctacaatttcagcgcccgcttgcacaaacgctttatcgtcaaaacttgccagttgacccgcgccgctctctaccgcgacggtaaaacccagtttcagcagctgttccactgtttttggcgttgctgcaacacgggtttcattggttaaccgttctcttggtatgccaattcgcatgatattcccttccatcggttttattgatgatggtttgcctgtgtcaggagccacacaagccgctcatgtacgagctaaatgttactccgttaaaataaattagtaacaaacgccctataacgtactgaaaattatgcctgtgatctagcgccaaaaatcagtatttcggcgtgaactcgcaaaatattaacgattcagccgtgatagtgggataaacaccttagaacgccggataaagactgataattgtcttcgacggtcgggtaaaacgagacatcgccccggcacgaatcactacttaacattaaattaacttatataattcagttgcttcagtagtaatgatgctgatacggctgttttttaagcatagacggtcatttgagcaggattaaaattggcttaaagaatgtgatatgaaaaatgacgcagacagttacaccgtttaaatgcaataatcagccacgtttctcgttaataacaataccagtacctggtttgcgcaaggcgaaggattatttttatgaagcttaagaacaccctcctggcgtcggcactgctttctgctacggcattctccgttaacgcagcaacagaactgacaccggagcaagcggcagcggttaaaccttttgaccgtgtagtggttaccggtcgttttaatgctattggcgaagcggtgaaagccgtttctcgtcgcgcagataaagaaggtgccgcctctttttatgttgtcgacacttctgattttggtaacagcggtaactggcgtgtggtcgctgacctctataaagccgatgctgaaaaagcagaagaaacaagtaatcgcgtaattaacggtgttgtcgaactgccgaaagatcaggctgttctgattgaaccgtttgacacggtcaccgtccagggcttctatcgtagccagccagaagtcaatgatgccatcaccaaagcggcaaaagcgaaaggtgcctactctttctacatcgttcgtcaaatcgatgccaaccagggcggcaaccagcgtattactgcattcatctataaaaaagatgctaagaaacgtatcgtccagagcccggatgtgatcccggcagattccgaagcaggacgtgcagctctggctgccggtggcgaagccgcgaagaaagttgagatcccaggtgttgcgactaccgcatcaccaagttctgaagtcggtcgtttctttgaaacccagtcatcaaaaggcgggcgttacaccgtcacgctcccggatggcactaaagtcgaagaactgaacaaagcgaccgcagcgatgatggtcccgttcgacagcatcaaattctctggcaactacggcaacatgaccgaagtctcctatcaggttgcgaaacgtgccgcgaagaaaggtgctaagtattaccacatcacccgccagtggcaggaacgtggtaataacctgaccgtcagcgcagatctgtataaataactattcagttactcctataaggcggcttgatgccgcctttcgcatttttagtcacaaatttccccgcgaccattgcatgcagacacatctcttcgtaaaatcccgcgcttcagtggcaaactccatttttatgcgttttgccctaatatttattcttcttatcacgttttaatcactggatatcgatggaaaagaaactgggactgagcgcactcaccgcgctggtattaagctcaatgctgggcgcgggtgttttcagtctgccgcaaaatatggcggcagttgccagcccggcagcactgctcatcggctggggtattactggcgctggcattttattgctggcctatgccatgctgatcctcacgcgcattcgtcccgaacttgacggcggtatctttacctatgcccgcgaagggtttggcgagctaatcggcttttgttccgcatggggatactggctgtgcgcagtcatcgccaacgtctcctatctggtgatcgttttttccgcgttaagcttttttacggacacgccggaattgcgcctgttcggcgatggtaatacctggcaatcgatcgtcggtgcatcggctttattgtggattgttcactttttgatcctgcgcggggtgcaaaccgctgccagcattaacctggtggcgacactggcaaaattgttgccgctgggtctgtttgttgtgctggcgatgatgatgttcaaactggataccttcaagctcgacttcaccggacttgcacttggcgtacccgtttgggaacaggtgaaaaacaccatgctgatcaccctgtgggttttcattggtgtggaaggtgccgtggttgtttctgcgcgtgcgcgtaataaacgtgatgttggcaaagcgacactgctggcggttctctccgctctgggcgtttacttgctggtaacgctgctttcgctgggtgtggtggcacgtcctgaactggctgaaattcgtaacccgtcaatggccggtctgatggtggaaatgatgggaccatggggcgaaatcatcatcgctgccggtttgatcgtttccgtttgcggcgcgtacttaagctggaccatcatggcggcagaagttccgttcctggctgccactcataaagcattcccacgcatttttgcgcgccagaacgcacaagctgcgccatccgcctcactgtggttgaccaacatctgcgtgcaaatttgtctggtactcatctggctgaccggttccgattacaacacgttgctgaccatcgcctcagaaatgattctggtgccctatttcctggtcggcgcgttcttgctgaaaatcgcaacccgtccactgcataaagcggtaggtgtcggtgcctgcatttatggcttatggttattgtacgcctctggtccaatgcacttgctgttatccgttgttctgtatgcgccggggctgctggttttcctgtatgcgcgcaaaacgcatacacatgataatgtactgaaccgtcaggaaatggtgctgattggcatgctgttaattgcctcagttccggcgacctggatgctggtgggataacgttcatcccatcgttggatagcaaaggagataacgatgggtaaagcccagcccttgccaatattaattactggcggaggtcgtcgcatcggcctcgccctcgcctggcatttcattaatcaaaagcaaccggtgattgtcagctatcggacgcactatccagccattgatggactgattaaggcaggtgcgcagtgtattcaggctgatttttcgaccaacgacggtgtgatggcgtttgccgatgaagtactaaaaagcacccatggtctgcgtgctattttgcataacgccagtgcgtggatggcagaaaaaccaggtacaccactggccgacgtactggcttgcatgatgcagatccacgttaataccccatacctgctcaaccatgcgctggaaagattactgcgtgggcacggacacgccgccagcgatatcattcactttaccgattatgtggtggagcgcggtagcgacaaacatgttgcgtatgctgcaagcaaagcggcactggataatatgacccgctcgtttgcccgcaagctggcaccggaagtgaaagtgaattctattgcgccatcgctgatcctgtttaatgaacatgatgatgccgaatatcgacaacaggcgctgaataaatcactgatgaaaaccgcgcctggcgagaaagaagtgatcgacctggtcgattacttacttaccagttgctttgtcaccggacgcagtttcccacttgatggcggtcgtcatctgcgttaatgcagctttatccagcatataatcaacacccatgcgcttatcccccaacacgcaacagaaccaacaaaagcggcgggcaagcgcatcattccggtgaaataccacagcgacaccaggtaaacaaaatagggaataatcgaccacatactaaaaatgatggttgcgcgtaaggcttcaatgccgcgttcgctggcaacaatataatgcgcgataagcgcaaaggtcgggaaaagtggaatcagcccggcgatataataatttttcgtttttgctaaaacaccaatcaacagcactaccagcgcaccgagcgcggctttgattaccagccccatttttttaccttaacacttccataacaagtcatcagtagaatacctgatgaaaacttgtttagaaacgattgatagtaagtaaaaacagcgcggtgtattgtgacgtttttatatctaccgtgaatgttatgaacactatcgtatttgtggaagatgatgcggaagtcggttcactgattgccgcgtacctggcaaaacatgatatgcaggttaccgtagagccgcgcggcgaccaggccgaagaaaccattttgcgagaaaatccggatttggtgttactcgacatcatgctaccaggcaaggacggcatgaccatttgtcgtgatttacgcgcaaagtggtctggaccgattgttcttctaacctctctcgatagcgatatgaaccacatcctggcactggaaatgggtgcctgcgactatattctcaaaacgacgccccctgctgttttgctagcgcgtttacgtttgcatttgcgtcagaatgagcaagccacactgagcaaaggtcttcaggaaacgtctctgactccctacaaagccctgcatttcggcacgttgaccatcgatcccatcaaccgcgtagtcaccctggctaacactgaaatctcgctctcgacagctgatttcgaattattgtgggaattagctacccatgccgggcaaatcatggaccgcgatgcattgctgaaaaatttacgcggcgtcagttatgacggactggatcgtagcgtggacgtggctatttcgcggttaagaaaaaaactgctcgataacgccgcagaaccttatcgcattaaaactgtgcgtaacaaaggctatctttttgcgcctcatgcatgggaataagcgatgaaaaaactgtttatccagttttacctgttattgtttgtctgcttccttgtgatgtctctgctggttgggttggtgtacaaatttaccgccgaacgcgcgggcaaacagtcgctggatgatttgatgaacagttcgctgtatctgatgcgcagcgaattgcgtgagatccccccacacgactggggtaagacgctgaaagagatggatttaaatctctctttcgatctgcgtgtcgagccattgagtaaataccatcttgatgatatttccatgcaccgactgcgtggcggcgaaattgtcgccctggacgatcagtacacgtttttgcagcgtatcccgcgcagccactacgtgctggcagttggtcctgttccttatctttattatctccatcagatgcgattgctggatatcgccctgatcgcttttattgctatttccctcgcctttccggtgtttatctggatgcgtccgcactggcaggatatgttaaaactggaagcagcggcgcaacgatttggcgatgggcatctcaatgagcgtatccactttgatgagggttcgagctttgaacgacttggtatcgcatttaaccagatggcggacaatatcaacgccttgattgccagcaaaaaacagcttattgacggtatcgctcacgaactgcgaacaccgttagtgcgcctgcgttatcgactggagatgagcgataacctgagcgccgccgaatcccaggcgttgaatcgtgatatcagtcaacttgaagctttaattgaagagctgctgacttatgcccgactcgatcgcccacaaaacgagcttcatcttagcgaaccagacctgccgttgtggctgtcaacgcatctggcagacattcaggcagtaacgcccgataaaacggtacggattaaaacgctcgcgcaaggccattatgcggcgttggatatgcgcttaatggagcgcgtgctggataatttgctcaataacgccctgcggtactgccattcaacggttgaaaccagcctgctactgtcggggaatagagcgacattaattgttgaggatgatggcccagggattgccccagaaaaccgcgaacatatctttgaaccttttgttcgcctcgatcccagccgggatcgctcaaccggcggctgcgggctggggctggcaattgtccactctatagcactggcaatgggcggtacggttaattgtgacaccagcgaactgggtggtgctcgcttctcgtttagctggccgttatggcataacatcccgcaatttacctctgcctgacactacgcgcacgatggtcaagtcaccacgactgtgctataaaataagtatgttgtaactaaagtggttaatattatggcgcgttacgatctcgtagaccgactcaacactacctttcgccagatggaacaagagctggctgcatttgccactcatcttgagcaacacaagctattggttgcccgcgtgttctctttgccggaggtaaaaaaagaggatgagcataatccgcttaatcgtattgaggtaaaacaacatctcggcaacgacgcgcagtcgctggcgttgcgtcatttccgccatttatttattcaacaacagtccgaaaatcgcagcagcaaggccgctgtccgtctgcctggcgtgttgtgttaccaggtcgataacctttcgcaagcagcgttggtcagtcatattcagcacatcaataaactcaagaccacgttcgagcatatcgtcacggttgaatcagaactccccaccgcggcacgttttgaatgggtgcatcgtcatttgccggggctgatcacccttaatgcttaccgcacgctcaccgttctgcacgaccccgccactttacgctttggttgggctaataaacatatcattaagaatttgcatcgtgatgaagtcctggcacagctggaaaaaagcctgaaatcaccacgcagtgtcgcaccgtggacgcgcgaggagtggcaaagaaaactggagcgagagtatcaggatatcgctgccctgccacagaacgcgaagttaaaaatcaaacgtccggtgaaggtgcagccgattgcccgcgtctggtacaaaggagatcaaaaacaagtccaacacgcctgccctacaccgctgattgcactgattaatcgggataatggcgcgcgcgtgccggacgttggtgagttgttaaattacgatgccgacaatgtgcagcaccgttataaaccacaggcgcagccgcttcgtttgatcattccacggctgcacctgtatgttgcggattaacgcccggctttcatactgccgaccatctgttctggccgtacccagctatcaaactcggcttcgctaagataccccagcgcaagggccgcagcttttaaggtcagcccttctttatgcgctttttggcgatctccgcggctttgtcataaccaatgtgggtgttaagcgcagtcaccagcatcagcgattcattgagtaattgattgattcgctcacgattcggttcaatacccactgcgcagtgtttgttaaaactttccatgccatctgccagcaagcgcaccgattgcaggaaattgtggatcaccattggacggaagacgttcagttcaaagttaccggaagcgccccccatgttgatcgccacgtcgttccccatcacctgacagcagagcatggttaatgcctcacactgtgttggattcactttccccggcatgattgagctgcccggctcattttccgggattgagatttcaccaattccgcagcgcgggccagaggccagccagcggacatcattggcgattttcatcagtgacgcagccaaccctttcaacgcgccgtgcgcctgaaccagggcatcacaggtcgcaagcgcttcaaatttgttcggcgcggtaacaaacggtgcacaggtaatgactgccagttcatctgctacgcgacgcgcatactccggatgggtatttagtccagtacccaccgctgtaccgccaagagccagttccgctacgtgaggcaggctgtattcgatatgtttgagattatgctcgagcatcgctacccagccggaaatctcctgccctagtgttagcggcgtggcgtcctgcaagtgggttcgaccgattttgacgatatcggcaaatgcacgcgatttttcactcagcgtctgtgtcagggttttaagctgcggaatgagttgcttgcgcagcgccagcagcgccgcaacgtgcatcgccgtcggaaagacatcgttggaactttggcttttgttcacgtcgtcgttagggtgaactttacgttccatcccgcgcacgccgccgagtaattcactggcccggttagccagcacttcgttcatgttcatgttactttgcgtgccggagccggtctgccagatagccagcgggaattcgtcgtcatgctgtcctgccagtacttcatccgccgcctgccgaatggcgctcgctttctcttcagacaacaagcctaaatcttcattaacttttgccgctgcgcgcttggttagcgccagcgcatgaatcagtgaggtgggcattttctccgtcgaaatgcggaaatgctccagcgagcgttgagtttgtgcgccccacagcttatctgccgggacatcaatcgcccccatcgaatctttttcgctgcgtactgtattcatggcctgctcctcacctgtttaattttttctttctgttttgctttcgttaagcaacttttagctcacttattatttaccatttgataacaaatgtttggtctttcgtgccatgtaaaaaaaccgccccgaagggcggctctgtttatttcacacagcgagtgcactgtgtgagttgtatctgctggaagaagtcatttcctttatcatccacaaggataaacgccgggaaatcttccacttcaattttccagatggcttccattcccagttccggatattcaacacattccaggctcttaatacttccctgcgccaatacagcggccggaccaccgatactgccaaggtagaagccgccgtgttttttacaggcatccgtcacctgctggctgcggttgcctttcgccagcatgatcatacttccgccctgcgcttgcagttgatcgacataagaatccatccgtccggcggtcgttgggccaagagaaccggaggcataaccttccggcgttttggccggacccgcgtagtaaatcggatgatctttaatgtactgcggcagcccttcaccgttatccatccgctctttcagtttggcgtgagcaatatcacgaccgacgataatcgtgccgttaagcgataagcgtgtagaaacgggatactgcgacaactgtgcgaggatctctttcatcggacggttaaggtcaacgcacaccgcttcgccttctcccgctttgcgcagctcttccgggatatatttgcctgggttatgttccagtttttcgatccagatcccctgacggttgatcttcgctttgatattacggtcagcagagcaggagacgcccataccgaccgggcaggatgcgccgtgacgtggcaggcgaatcacgcggatgtcgtgagcgaagtatttaccaccaaactgcgcacccagaccaagattttgcgcttcgatcagcaattctttttccagttccacatcgcggaacgcctgaccgtgctcattcccttccgttggcagttcatcatagtatttagcggaagccagtttgaccgttttaaggttcgtttctgcagaagttccaccaataacgaacgcaatatgatacggaggacaggccgccgtacccagcgtgcgcatcttctcaaccaggtaatttttcagtttccccggcgttagtaacgctttggtttcctgatagagatacgtcttgttagccgaaccgccacctttggcgatacagaggaatttgtactcgtcgccatcaacggcataaagatcgatctgcgctggtagattggtgccggtattcacctctttatacatatccagcggcgcgttttgcgagtagcgcagattatcttcgatataagtgttatagacaccgcgtgccagcgccgcttcatcaccgccaccggtccatacacgctgcccttttttaccaacaataatcgcggtgccggtatcctgacaggttggcagaacgcctttcgccgcgatgtcggagttgcgcaggaattgcagcgccacatatttatcattttcgctggcttccgggtcacgcagaatgtcggccacctgttgttggtgagccggacgcagcataaatgacgcatcatgaaatgcctgacgcgccaacagagttaacgcttcgggtgcgactttcaaaatctcctgcccttcaaattcagatacgctaacgtgttcgctggttagcaggtaatactcagtatcatcttttttgagtggaaaaggagcctgataatgaaagggtttgtttgacattgttctctcacttactgcctggtttggttatgctctgggcgggtgttccgttgccctgttaaaagcgagtaacaatatcctacacacttttttaacaaaaactgagactagtacgactttttgcggctccaggttacttcccgtaggattcttgctttaatagcgggattaatttccacattaaaacagggattgatcatgcaaaaactcattaactcagtgcaaaactatgcctggggcagcaaaacggcgttgactgaactttatggtatggaaaatccgtccagccagccgatggccgagctgtggatgggcgcacatccgaaaagcagttcacgggtgcagaatgccgccggagatatcgtttcactgcgtgatgtgattgagagtaataaatcgactctgctcggagaggccgttgccaaacgctttggcgaactgcctttcctgttcaaagtattatgcgcagcacagccgctctccattcaggttcatccaaacaaacgcaattctgaaatcggttttgccaaagaaaatgccgcaggtatcccgatggatgccgccgagcgtaactataaagatcctaaccacaagccggagctggtttttgcgctgacgcctttccttgcgatgaacgcgtttcgtgagttttccgagattgtctccctactccagccagtcgcaggtgcacatccggcaattgctcactttttacaacagcctaatgccgaacgtttaagcgaactgttcgccagcctgttgaatatgcagggtgaagaaaaatcccgcgcgctggcgattttaaaatcggcgctcgacagtcagcagggtgaaccgtggcaaacgattcgtttaatttctgaattttacccggaagacagcggcctgttctccccgctgttactgaatgtggtgaaattgaatcctggcgaagcgatgttcctgttcgctgaaacaccgcacgcttacctgcaaggcgtggcgctggaagtgatggcgaactccgataacgtgctgcgtgcgggtctgacgcctaagtacattgatattccggaactggttgccaatgtgaaattcgaagccaaaccggctaaccagttgttgacccagccggtgaaacaaggtgcagaactggacttcccgattccagtggatgattttgccttctcgctgcatgaccttagtgataaagaaaccaccattagccagcagagtgccgccattttgttctgcgtcgaaggcgatgcaacgttgtggaaaggttctcagcagttacagcttaaaccgggtgaatcagcgtttattgccgccaacgaatcaccggtgactgtcaaaggccacggccgtttagcgcgtgtttacaacaagctgtaagagcttactgaaaaaattaacatctcttgctaagcttattaaaggcttataacaccttcaggcggccagtccgcctgatttcattttatggataatcattatgaataaatcgctggtagcggtaggcgtcattgttgcgctaggcgtagtctggacaggcggcgcatggtatacaggcaagaagattgaaacccatctcgaagacatggtcgcgcaggcgaacgcgcaactcaaactgacagctcctgaatccaacctggaagtgagttatcaaaactatcatcgcggcgtattcagcagccagttgcaactgttggtgaaacccattgccgggaaagaaaatccgtggattaaaagcggtcagagcgtcatcttcaacgaatcggttgatcatggtcccttcccgcttgcccagcttaaaaaactgaacctgatcccgtcgatggcatcaattcaaaccacgctggttaataacgaagtaagcaaaccactgtttgatatggcaaaaggtgaaacgccttttgagattaactcgcgcattggttacagcggtgattccagttccgatatttcgctcaagccactgaattacgagcaaaaggatgaaaaagtcgcctttagcggcggcgagttccagttaaatgcggacagagacggcaaagctatctccctttccggggaggcgcaaagtggtcggatagacgcagttaacgaatacaaccagaaagtgcagttgacctttaataatctgaaaaccgacggttccagcacgctggcaagttttggtgagcgcgtaggaaaccaaaaactgtcactggaaaaaatgaccatttcggtggaaggcaaagaactggcactgctggaaggcatggagatcagcggtaaatcggatctggtcaatgatggtaaaacgatcaatagccaactggattactcgctaaacagcctgaaggtacagaatcaggatctgggcagcggcaagctgactttaaaagtcggccagattgatggtgaagcctggcatcagtttagccagcaatataacgcgcaaactcaggcgctgctggcacagccagaaattgccaacaatcccgaactttatcaggagaaagtgacggaagccttctttagcgccctgccgctgatgttgaaaggcgatccggtgattactatcgcgccgctaagctggaaaacagtcagggtgaaagtgcgctgaatctgtcgctgttcctgaaagatccggcaacgactaaagaagcgccgcaaacgctggcgcaggaagtagatcgttcggttaaatctctggatgcgaaactgaccattccggtggatatggcaactgagtttatgactcaggtagcgaagctggaaggttatcaggaagatcaagcgaaaaaactggcgaaacagcaagttgaaggtgcatcagcaatggggcagatgttccgtctgaccaccttgcaggacaataccatcaccaccagcctgcaatatactaacggtcagataacgttaaacgggcagaaaatgccactggaagatttcgttggtatgtttgcaatgccggcattaaatgttccggtcgtacccgctattccgcagcagtaattcacagccaaaacgccggagatttttctctccggcgttatttcttacttcagcataaagtcatactgaatactcattttcacatcccagtaattcaggcgatcgcccagcgtactgccatcgcgcttttcccgccctttatcggcagcaagaaagaaattcatcccttgtaacggcccttcgctgacccgatagttcataccacctaagatacccatgccttcaatccgcacatctcgtttactggattcatagccgcgagtcacaatcggtgcaaatgtcagtgtaaattgcggcgttaaacgatagttgacgcccaattgccaggactgcattccttcacggttacgatcaagacttaatgaaaagggatagccaatgtcggtatccaccacggcaccattcattgcatggcgcaaataaccaccactgccaaatacgcttccccacggcgcattccaggtcaattgtccactaaccaacgccgtttcattgggctggctggtattacgacttaaaccttcgagctgcgcgtaaaagccgagcaactcccctttcaacgtataattcgggtcgagcggtatgcttttctcgagaatactttgtatctgattggaaacatctttctgtaccgatgcccccagagaatagcgactggtatcatcatgccaactggcggctaaaaaagaacgtgcgcgatgtttatcgtattttcccgtctggctgttatacaccccttcatcacgaataccggttgttgaatcagtccataaaaatactcgtgaacgccacattccccacagatcaatatttggtgttaaagcccaataacctaatgctccttcagaaactgtcggtaatgtacgttgcgaactgccagccattaacggaatacgataaggtaagctaccataactataatccgtcccgaagcgacctaatttaagcaggctattttcactgggttttatttttactgcccccagggcaaagccaaaacttttatcaccatcaagataccaccgggtactcatatcagcacgagcacctaatttataaacataatacgccccgccttcaacgccaataatattggaataataaccactattgaaatcgagcaatcctccctgtacccatgcgtaaatatctcttcccgcgccagcactgggcttatccgccctgcgcaattcgtttttcagtctgatgcgtagtcccgcttcatcgtcagccagttgcgccgcataagcagaggtaaggccagaggcagccgtcaggcaaataacggccatggccactatttttctcatagttgcacctttgatgttctgattatttttattgaatattaattagtgatatcgctgattaattgctgctgcacttttttacgattatcaatttcaaccacgatttctttgaattttttatccgtgagcggataaaaccagataataacgaatgccagtagcataaatccgcaaggtactaaggcaattgatgtgcggatgcccataataacttccggcgtttgcacctgattggcgatatatccgcttaatcccaaaataaaggcaggaattgaacctccgattgcctgaccgcatttacgggtaaatgagaatagtgaataggtgagcccttcaattcgcacgccggtcaggtattcaccgtattctacggtatcagcttccagtgcccacatcacagtcatagtaacgccctgaccaattgaagcgatggccaacgcaaccaacgccaccggcagtgaccagacggaaacccagaagaatagcagataaccgcaggttcccagcaaagcgccaatcaggaaggtattctttttaccgatcctcgcgaccatccccggcaccagcggtgccgatgccacagtaccaaccaggttttgcaccagtaccagcacagtgaacagcccggtatcatttaacacatagcgcacgtagaacaacgacgaggcgctgaccgcgaaggtcgaaatcagcacacacagcgcaccgatgcacaacataaacagcgggcgattccgtttcagggtttgcagactgatcttcaatgacggctgcgccacgatacgtaccacattctcacgcgtcgatttgaagcagatgaagtaaagcaccattccggcaatcgccagcacaatcgtccagaaatggtataccgacaccatctcttccgggctggagttcttaatgctcggtcctatcagaaatgccaggcagacaaaggttaatgaagcggcaatcccgcgagccgcgcccagacgggcgcgggattgtggttgttgggtcatcgcggtagcaagtgaaccataaggaatattcaccaggctgtagcaaagcccgaggcccatgtaggtcaaatatgcatacactactttgctgctatggctccagtcggtcggtacccagaataccagcacgctgaagatcattaacggcgcagtaccgaagagtaaaaacgggcggaattttccccagcgggtattcacactgtccaccactcgtccggcaaagacgtcggcgaaggcatcgaatacccgcaccagtaacagcatggtgcccgccgcagcggcaccgacgccagcgacgtcggtgtagtaactcaataggaagagcgcccccattgcgaaggcgaagttattggcgacgtcaccgaggctgtagccgacgatggtgcgccaggagagttgttgattcattgtttgcctccctgctgcggtttttcaccgaagttcatgccagtccagcgtttttgcagcagaaaagccgccgacttcggtttgcggtcgcgagtgaagatccctttcttgttaccgccaacgcgcaatatgccttgcgaggtcgcaaaatcggcgaaattccatacctgttcaccgacgacggcgctgacgcgatcaaagacgcggtgatacatatccagccatgcacactgatactcttcactccacatgtcggtgtacattgagtgcagcccggctaacgtatccacgccgtattcggtgatgataatcggctgatgcagtttctcctgccaggccagaagttctttttccagtaccttctctgccgtttccaaatcgccgctttggacataccatccgtaataacggttcaggcacagcacatcaaagagatcgctgatggtatcggtgtgagcgtcgcagaacattacattgacgcaggtgatcggacgcgtcgggtcgagtttacgcgttgcttccgccagtggcgcgaaatattcccgtgcaccttgcggacgggtatccggttcgttggcaatactccacatcaccacgcttgggtggtttttgtcacgcgctatcagctctttaatcgcctgtaagtgcgcttgctgagtttccccgttgactgcctcttcgctgtacagttctttcggcttgttgcccgcttcgaaaccaatgcctaaagagaggttaaagccgacagcagcagtttcatcaatcaccacgatgccatgttcatctgcccagtcgagcatctcttcagcgtaagggtaatgcgaggtacggtaggagttggccccaatccagtccattaatgcgtggtcgtgcaccatcagcacgttatcgaatcctttgccacgcaagtcagcatcttcatgacgaccaaagccagtaaagtagaacggtttgtggttaatcaggaactgttcgcccttcactgccactgaccggatgccgacgcgaagcgggtagatatcacactctgtctggcttttggctgtgacgcacagttcatagagataaccttcacccggttgccagaggtgtggattcaccacttgcaaagtcccgctggtaccttgtccagttgcaaccacctgctgatccgcatcacgcagttcaacgctgacatcaccatttgctaccacctgccagtcaacagacgcgtggttacagtcttgcgcaacatgcgtcaccacggtgatatcgtccacccaggtgttcggcgtggtgtagaccattacgctgcgatggatcccggcatagttaaagaaatcatggaagtaagactgctttttcttgccgttttcatcggtaatcaccattcccggcgggatagtctgccagttcagttcgttgttcacacaaacggtgatacgtacacttttcccggcaataacatacggcgtgacatcggcttcaaatggcgtatagccgccctgatgctccatcacttcctgattattgacccacactttgccgtaatgagtgaccgcatcgaaacgcagcacgatacgctggcctgcccaacctttcggtataaagacttcgcgctgataccagacgttgcccacataattacgaatatctgcatcggcgaactgatcgttaaaactgcctggcacagcaattgcccggctttcttgtaacgcgctttcccaccaacgctgatcaattccacagttttcgcgatccagactgaatgcccacaggccgtcgagttttttgatttcacgggttggggtttctacaggacgtaacataagggactcctcattaagataaaaatactggtcaacctttaatctgattagttaaccaattctgtgttgcacacagttatctgtgagaaacccatggaagagaaatggaaataaaaagaactgacaccgcgatcaaaaaaccaaaaactgcaatacccacagcgtgatattgatcgcattaatctttaaaacggcgttgacagaagccataaaataagcaaccgaacgttcgttcgagtatattgggaacgataaactctcatgacatatggctacggtgaatatttttgggggggaattctccgatcccggctagattgtattttgtacagggaaattaaagtatgaaacgcgggcacagttatcaccagcccgcgaaatgagaggatcaggatgcggttaagataccgccaatcatcgcgcgtaatccctgagcaaacgacgcttcacgcgccagatcttccgcttcgatatcggccagtacaccgtaggtcagatccagcagtaaacgtgaagtcattgacgtgttgatgtctgggcttatctcgcctttttgctgggcatcacgcatccgctgggcaacaaattcagtgatcgtcatatgcttatttttaagcatggcggcgacctgtgggttacgcatcccttccgccataatttcgaccaccagcgcccgttgcccaaaggcttcatgggtgagagagacaatagactcgaccatatagtcaacaaaatgaatcccttcaatcggttcccggaaacgggccagcgccctctcctggtcctgtaagataatcgcctgaatcaaggcttctttggagatgaaatggtgatagagcgtcccgggactgatggcgcaggatttacagatggctttcatcgaggcactgtgaaatccattttctgaaaaaatctctctggcagcattgaggatccgggtccgtgtcggttgtgcttcagtctgcatgttatccatcattaaaccattatagttagcgtgaataactagtttaccgcgttgtcaggtgagcgcctatcattgctgttgaatagtgcgaaggcacactctattcgtatgcttttcatccagctattggttaaccaatagccgtgatttggctgccagttgtttagcagagacgttgatgaattgcacacgctatcccggtaaacaacacatacggctgtttaccggttcgttagtgtattaattgagctcctgtaccccaccaccggagacggtgagaatttgtccgcttacccagctggctgcaggcgagcaaaggaacagcgccgcgttagcaatatcttgcggttggcccagacgtctgatcggcgtgtgctgtaacattttttgttcaatttctggtgtaataacggatttcagggcatcggttaatattgcccccggcgcaatgccattcacccgaatatttttttcacccaggtcaaatgccatatttctgaccagatgactggccgcagctttagatgatgcataggaagtcatgtttatatttttattttctgccgccatagaagtgatggtcagaataacgccaccgccatttttttccatttctggcgcaacaagttgtgacagatggaaaaaagaaaacacattcagttcataagcacggcgaaaatctgccattggcatatcaaacggtttaggaccaccgccaccggcgttgttaaccaggatatcaactttacccagcttactgacggcaaagtctgccagtgcagagagttcctgttcggaagtaatatcacaacggcaggcaaatgcctgaccacccagttgttgaatttcgtctacaacatggttagctgcgtcggcgttaatatcactgaccaccacagatgcgccagctgtcgcgaatgtaatggcgatttctttaccaatacctgcacccgcacctgtgatgatggcgcattttccgtcgagtctcaggttgtcagaattaaacacataaacctcctgtgaacttcagtaaaaataaaaggcaccgcctgtgtgccacattttttatcattaaccttgaggaaaggacactaccaggtatagcagataaagagaggattatttcgccgcaatgagccgggcgggaataataagattgcgtgaatgcgtctcttcatgggtgattttttgcatcatgcgatccgcaagtgtggtaccaagttcccgcgcaggcgtgctggcccaggtaacgggtatatcatcaagtgtggttggtgtcgcatcggtaaatgccgccagcgaaacttgttgctcaaagtaacgatcgactccgctttccccgctttgccgccctgctttgagcaaaccaaaccatgcccccatcgcaatagtttcgttatagcaaaccacagcactgatggtcgggttatgacgtaaaagcgccgtgatagcttccgcggcttgcttctggctggatgtgcactccagcacccaatcgctgtgaaacggcaggccaaattttagtagagttgcacaatagccccccacccgttctgcacgggttaatgaggaactttgccctcccagccaggcgatccgctgatgcccattgcgaatgagatgctccgtcaacaactgtgcagcctgcatgttgtccgggcgaaccgtatcaacatcatcaagataactggcacgggaagcgaaaatcaccgggatagctttttcttctgccatccgtcgcaggtcatcgctgcttcctgcagccccggcaattaccacaccatccacaccctgattcagtaacagtgaaaaccgctgtgccagctgctcgccgtctttaccaccgtgaagcaaaaaaaccatccgtccctgcgcttccagagcttccgtcaatccggccgtcaattcggcgtaaaacggcgcagataaatcacggacgatcaaaccaatgacgccgctttgcccgccgcgcagcgccgacgcctggcgattgcgcacaaatcccagctcttcaatggcggcgttaacgcgttctcctgtggcggtagagattcgccctttgccactaagcaccagcgaaacggtacttaccgacacgcccgcagccagcgcaacatcatgaatggttatttttttggcggtagccatgcagatgacctactccctgattatgtgacagataaaacgttttaccttttatttatcttatacccgctattatcgttgcgtaatgtgatttatgcctcactaaaatttgataaaacgttttatcttctcgcgcaatttactgaatccagattgttctctacgaggagtcgttttatgacggcgaaaacagcaccgaaagtcacgctgtgggagttcttccagcagttaggcaaaaccttcatgttacccgtggcattattgtcgttctgcggcattatgctcggcattggtagttctcttagcagccatgatgtcataaccctgatcccggtcctgggcaaccccgtgttgcaggctatctttacctggatgagtaagattggctcgtttgcttttagtttcctgcctgtcatgttctgtatcgccatcccgctgggcctggcacgcgaaaataaaggcgtagcggcattcgctggcttcgtcggttatgcggtaatgaacctcgcggtaaacttctggttgaccaataaaggcattctgccaaccacggatgccgcggttctgaaagccaataacatccagagcattcttgggatccagtcgatcgataccgggatcctcggtgcggtgatcgccggtattatcgtctggatgctgcatgagcgtttccataatatccgcctgccggatgcgctggcattcttcggcggtacgcgcttcgtaccaattatctcctcgctggtgatgggccttgtcggcctggtgattccattagtctggccgattttcgccatgggtattagcggcttgggccatatgataaacagcgcgggtgatttcggaccgatgctgtttggtaccggtgaacgtctgctgttgccgtttggtctgcatcacattctggtagcattaattcgctttaccgacgcaggcggcacgcaggaagtctgcggtcaaaccgtcagcggcgcactgaccatcttccaggcgcaattgagttgcccgaccactcacggtttttctgaaagcgccacgcgtttcctttcgcaaggtaaaatgcctgcgtttctcggcggtctgccgggtgcagcgttagctatgtatcactgcgcgcgcccggaaaatcgccataaaattaaaggtctgctgatttctggcctgatcgcctgcgtcgttggcggcactaccgaaccgctggaattcctgttcctgttcgtagcgccagttctgtatgtcatccacgcgctgttaaccggcctcggcttcaccgtcatgtctgtgctcggcgtcaccatcggtaataccgacggcaatatcatcgacttcgtggtgttcggtattttgcatggtctgtcaaccaagtggtacatggtgccagtggtggcggcaatctggtttgtcgtttactacgtcatcttccgtttcgctatcacccgcttcaatctgaaaaccccggggcgcgatagcgaagttgccagctcaatcgaaaaagccgttgccggtgcgccgggtaaatcaggttacaacgttcctgcaatcctcgaagcattaggcggtgccgacaatattgtcagcctcgataactgcattacccgtctgcgtttgtctgtgaaagatatgtcgcttgttaatgtgcaggcactgaaggacaatcgggcaattggcgtagtacaacttaatcaacataacctgcaggttgttatcgggccacaagttcagtcagtaaaagatgaaatggccggtctgatgcatactgtccaggcataaggataagatatgttcgatttttcaaaggtcgtggatcgtcatggcacatggtgtacacagtgggattatgtcgctgaccgtttcggcactgctgacctgttaccgttcacgatttcagacatggattttgccactgccccctgcattatcgaggcgctgaatcagcgcctgatgcacggcgtatttggctacagccgctggaaaaacgatgagtttctcgtggctattgcccactggttttccacccagcattacaccgcaattgatacgcagacggtggtgtatggcccttctgtcatctatatggtttcagaactgattcgtcagtggtctgaaacaggtgaaggcgtggtgatccacacgcccgcctatgacgcattttacaaggccattgaaggtaaccagcgcacagtaatgcccgttgctttagagaagcaggctgacgactggttttgcgatatgggcaagctggaagccgtgttggcgaaaccagaatgtaaaattatgctcctgtgtagcccacagaatcctaccgggaaagtgtggacgtgcgatgagctggagatcatggctgacctgtgcgagcgtcatggtgtgcgggttatttccgatgaaatccatatggatatggtctggggcgagcagccgcatattccctggagtaatgtggcgcggggagactgggcgttgctgacgtcgggctcgaaaagtttcaatattcccgcgctgaccggtgcttacgggattatagaaaatagcagcagccgtgatgcctatttatcggcactgaaaggacgtgatgggctttcttccccttcggtactggcgttaactgcccatatcgccgcctatcagcaaggtgcaccgtggctggatgccttacgcgtctatctgaaagataacctgacgtatatctcagataaaatgaacgccgcgtttcctgaactcaactggcagatcccgcaatccacttatctggcctggcttgatctacgtctgttgaatattgacgacaacgcgttgcaaaaagcgcttatcgagcaagaaaaagtcgcgatcatgccggggtatacctatggtgaagaaggtcgtggttttgtccgtctcaatgccggctgcccacgttcgaaactggaaaaaggtgtggctggattaataaacgccatccgcgctgttcgctaaccccaattgcgcaacgtaaaaaatcgttgcgcaatcgtggatttttaccctgctttgtttttataatggtgcgcacttttatattcagaaaaagagtgcgaccatgattgataccaccctgccattaactgatatccatcgccaccttgatggcaacattcgtccccagaccattcttgaacttggccgccagtataatatctcgcttcctgcacaatccctggaaacactgattccccacgttcaggtcattgccaacgaacccgatctggtgagctttctgaccaaacttgactggggcgttaaagttctcgcctctcttgatgcctgtcgccgcgtggcatttgaaaacattgaagatgcagcccgtcacggcctgcactatgtcgagctgcgtttttcaccaggctacatggcaatggcacatcagctgcctgtagcgggtgttgtcgaagcggtgatcgatggcgtacgtgaaggttgccgcacctttggtgtgcaggcgaagcttatcggcattatgagccggaccttcggcgaagccgcctgtcagcaagagctggaggcctttttagcccaccgtgaccagattaccgcacttgatttagccggtgatgaacttggtttcccgggaagtctgttcctttctcacttcaaccgcgcgcgtgatgcgggctggcatattaccgtccatgcaggcgaagctgccgggccggaaagcatctggcaggcgattcgtgaactgggtgcggagcgtattggacatggcgtaaaagccattgaagatcgggcgctgatggattttctcgccgagcaacaaattggtattgaatcctgtctgacctccaatattcagaccagcaccgtagcagagctggctgcacatccgctgaaaacgttccttgagcatggcattcgtgccagcattaacactgacgatcccggcgtacagggagtggatatcattcacgaatataccgttgccgcgccagctgctgggttatcccgcgagcaaatccgccaggcacagattaatggtctggaaatggctttcctcagcgctgaggaaaaacgcgcactgcgagaaaaagtcgccgcgaagtaacaaaatggatggtgcaaattgcaccatccatttttcatgcaaggcacaaagtcgcgcgatgtttggcggattcgatgcccagctcaatcaactccattacctggattgcctggcttgccggaaccggattttcaccatcgccatttaacgcatcacgaatagccgcatagtaagccggataattcccaggcaccgtcaacagcgtttcttcgacacgttcctcaccttccacgcgggtaagtacgccatcacgcatatcgtagccccagtcttcctgcggtagacgctcgccatttttcagacgttcttcctgtggatcgaggccatatttcacataactgcctcgggatccatgcacgatataccgtgctgactcagcggctgccagcatggtaccgtgtaaaatgactcgccgctgtggataggacaagatggcgtggaaataatcggtcgactgcgctccgggccgtaactgtgccaaatctaccgtcatgctgaccggtaaaccaaaaagcgtaatggcctgatcaagaagatgtggtgctaaatcgtaccagataccgctgcctgggccgccctgttcacgccaacgatcgcgcacctgcggacggaagcggtcaaaatgagactcaaagtaagcaacttcacccagcacgccttccgcgagtaaaccttttagcgtcaagaaatcgctatcccagcgacggttatggaatacagacagcacacgccccaggctttttgccagcgcatccagctctcgcgcttgtgacagtgtcacggtaaagggtttatcaacgaccacatgtttacccgcctcaagcgccgctttggctaacgggaaatgggtatcgttgggtgtaggaatgacaatcaggtctatgttgggatcgttaaacagatgcttcggctcagagacaaccgtaaccgttggccagtcggcttttacttttgtttcatcactgctggagattaccgccagttccagcccgggcgtgcccgcaatcaggggcgcatggaaggttttgctcgcataaccatacccaatcaacccaacacggatgttgtcgctcatgtcattgcctctcattgaagtatgatggctatttgacactatcctttacccacgctcaacagtttaataacctgccagcaataagggatgttgtttaacttaagtcaaaaaaatagcgaattttccaacgacaaaagctaaatatcgcaaaaacctcagtaaaaatcttgctggagctattattgctaagtaacatttaccccctgaagttaatggatcaatcaagagagatgtgggctgtaatgaatcgtcttattgaattaacaggttggatcgttcttgtcgtttcagtcattcttcttggcgtggcgagtcacattgacaactatcagccacctgaacagagtgcttcggtacaacacaagtaagctctgcacttgtggagcgacatgctgcccgtccgggtgcatgttttcacttgtcggatattaaaccaggaatttattatcttgttcgatgttgttggtgattgtcagggatagtaaagcgcgttactcttttcagagcagtttttcatccctgaatatttgccatcagcgcattcttattattgtaataacacaagcgttcacttttggtgaaattttatcatcactaataatacctacccctttggtattaattattttatggaccttttatgactgttcaggactacttattaaaatttcgcaaaatcagttcactcgaaagtctggaaaaactctacgaccatcttaattacaccctgacggacgatcaggaactgatcaatatgtatcgtgctgccgatcaccgtcgcgcagagctggtttctggcgggcgtttgtttgacctcggccaggtaccgaagtccgtctggcactatgtccaataaagaaagtagcgatcggttataaaagccttataataacgcccctaaaattagatttgcctgtttgcgtcgctattctggagaacctatgaccaccacaacgccacaacgtattggaggctggttgcttggcccgttggcctggcttttagtcgctctgttgagtacgacgctggcgttgttgctgtataccgctgcgttatcttctccgcaaacatttcaaacgctcggcggacaagcactgacgacacaaatcttatggggcgtttcttttattaccgctatcgccatgtggtattacacactgtggttgaccatcgctttctttaaacgtcggcgttgtgttcctaaacactatattatctggctgcttatttccgtattgctggcagtaaaagcattcgctttttcacccgtggaagatggcatagccgttcgccagttgctgtttactttgttggcaaccgcattgatcgtcccctatttcaaacgctcgtcgcgggtaaaagcgacgtttgtgaatccgtaataaccttacagttaacctgttgtcgcctgctctggattaacggataataggcggcttttttatttcaggccgaaaaatgactgactacctgttactgtttgtcggaactgtactggtcaataactttgtactggtcaagtttctcggtctctgtccgtttatgggggtttccaaaaaactggaaaccgcgatgggcatggggctggcaacaacgtttgtgatgacgctggcgtctatttgcgcctggcttatcgatacgtggattttgatcccacttaatctgatttacctgcgcaccctggcatttattctggtgattgctgtggtcgtgcagttcaccgagatggtggtgcgcaaaaccagcccggtgctttaccgtctgctggggatttttttgccgcttatcaccaccaactgtgcagtgctcggcgtggcgttgctgaatatcaatctcgggcacaatttcttgcagtcggcgctgtacggtttttccgccgctgtcggtttctcgctggtgatggtgctcttcgccgccatccgcgaacgccttgctgtggctgatgtcccggcaccttttcgcggtaatgccattgcgttaattaccgcaggtcttatgtctctggcctttatgggctttagtggtttggtgaagttgtaatgaatgctatctggattgccgttgccgccgtgagcctgctgggcctggcgtttggcgccattctgggttatgcctcccgccgttttgcggtggaagacgatccggtcgttgagaaaattgacgaaatcttaccgcagagccagtgtggtcagtgcggttatcccggctgtcgcccctacgcggaagccatcagctgtaacggtgaaaaaatcaaccgttgcgccccaggtggcgaagctgtgatgctaaaaattgccgagttgcttaatgtcgagccgcagccgctggatggcgaagcgcaagagctaacgcctgcgcggatggtggcggttattgatgaaaataactgtattggctgcactaaatgtattcaggcttgtccggtagacgccatcgttggcgctacccgtgccatgcatacggtaatgagtgatctctgtacgggctgcaatttatgtgttgatccgtgcccgacgcactgcatctcgttgcaaccggtcgcagaaacacctgactcctggaaatgggatctgaacaccattcccgtgcgtatcattcccgtggaacaccatgcttaagttattctctgcattcagaaaaaataaaatctgggatttcaacggcggcatccatccaccggagatgaaaacccagtccaacggtacacccctgcgccaggtaccactggcgcagcgttttgttattccactgaaacagcatattggcgctgaaggtgagttgtgcgttagcgtcggcgataaagtattgcgcggccagccgcttacccgtggtcgcggcaaaatgctgcctgttcacgcgcccacctcgggtaccgttacggctattgcgccccactctacggctcatccttcagctttagctgaattaagcgtgattattgatgccgatggtgaagactgctggatcccgcgcgacggctgggccgattatcgcactcgcagtcgcgaagagttaatcgagcgcatacatcagtttggtgtagccgggctgggcggtgcaggattcccgacaggcgttaaattgcagggtggcggagataagattgaaacgttgattatcaacgcggctgagtgcgagccgtacattaccgccgatgaccgtttgatgcaggattgcgcggctcaggtcgtagagggtattcgcattcttgcgcatattctgcagccacgcgaaattcttatcggcattgaagataacaaaccgcaggcgatttccatgctgcgcgcggtgctggcggactctaacgatatttctctgcgggtgattccaaccaaatatccttctggcggtgctaaacaattaacctacattctgaccgggaagcaggttccacatggcgggcgttcatccgatatcggcgtattaatgcaaaacgtcggcactgcttatgcagtgaaacgtgccgttattgatggcgagccgattaccgagcgtgttgtaaccctgactggcgaagcaatcgctcgcccgggcaacgtctgggcacggctggggacgccagtgcgtcatttattgaatgatgccggattctgcccctctgccgatcaaatggtgattatgggtggcccgctaatgggctttaccttgccatggctggatgtcccggtcgtaaagattaccaactgtctgttggctccctctgccaatgaacttggcgaaccacaggaagaacaaagctgcatccggtgtagcgcctgtgctgacgcctgccctgcggatcttttgccgcaacagttgtactggttcagcaaaggtcagcaacacgataaagctaccacgcataacattgctgattgcattgaatgtggggcttgcgcgtgggtttgcccgagcaatattcccctggtgcaatatttccgtcaggaaaaagctgaaattgcggctattcgtcaggaagaaaagcgcgccgcagaagccaaagcgcgtttcgaagcgcgccaggctcgtctggagcgcgaaaaagcggctcgccttgaacgacataagagcgcagccgttcaacctgcagccaaagataaagatgcgattgctgccgctctggcgcgggtgaaagagaaacaggcccaggctacacagcctattgtgattaaagcgggcgaacgcccggataacagtgcaattattgcagcacgggaagcccgtaaagcgcaagccagagcgaaacaggcagaactgcagcaaactaacgacgcagcaaccgttgctgatccacgtaaaactgccgttgaagcagctatcgcccgcgccaaagcgcgcaagctggaacagcaacaggctaatgcggaaccagaagaacaggtcgatccgcgcaaagccgccgtcgaagccgctattgcccgtgccaaagcgcgcaagctggaacagcaacagtctaatgcggaaccagaagaacaggttgatccgcgcaaagccgccgtcgaagccgctattgcccgagccaaagcgcgcaaactggaacagcaacaggctaatgcggaaccagaagaacaggttgatccgcgcaaagccgccgtcgaagccgctattgcccgtgccaaagcgcgcaagctggaacagcaacagactaacgcagaaccagaagaacaggttgatccgcgcaaagcggcagttgccgcggctattgcccgcgctcaggccaaaaaagccgcccagcagaaggttgtaaacgaggactaaatggtattcagaatagctagctccccttatacccataaccagcgccagacatcgcgcattatgctgttggtgttgctcgcagccgtgccaggaatcgcagcgcaactgtggttttttggttggggtactctcgttcagatcctgttggcatcggttagtgctctgttagccgaagctctcgtactcaaactacgcaagcagtcggtagccgcaacgttgaaagataactcagcattgctgacaggcttattgctggcggtaagtattccccccctcgcgccatggtggatggtcgtgctgggtacggtgtttgcggtgatcatcgctaaacagttgtatggcggtctggggcaaaacccgtttaatccggcaatgattggttatgtggtcttactgatctccttcccggtgcagatgaccagctggttaccgccacatgaaattgcggtcaacatccctggttttatcgacgccatacaggttattttcagcggacataccgccagtggtggtgatatgaacacactacgcttaggtattgatggcattagtcaggcgacaccgctggatacatttaaaacctctgtccgtgccggtcattcggttgaacagattatgcaatatccgatctacagcggtattctggcgggcgctggttggcaatgggtaaatctcgcctggctggctggcggcctgtggttgctatggcagaaagcgattcgctggcatattcccctcagcttcttagtaacgctggcgttatgcgcaacgttgggctggttgttctcaccagaaacactggcagcaccgcaaattcatctgctgtctggtgcgaccatgctcggcgcattctttattttgactgacccggttaccgcttctacgaccaatcgtggtcgtcttattttcggcgcgctggcgggcttattagtctggttgatccgcagtttcggcggctatcctgacggcgtggcttttgccgtcctgctggcgaacatcacggttcctctgatcgattactacacgcgtccgcgcgtctacggccatcgcaaagggtaaaccatgctgaaaactatccgaaaacacggcattacgttagcgctatttgcagcgggttcaacagggttaactgcggccatcaaccagatgaccaaaacgacgattgctgaacaggccagtctgcaacaagaggcattatttgatcaggtgctgccagccgaacgctataacaatgcgctggcacagagttgctatctggtaactgcgccagagttaggtaaaggtgagcatcgggtttacatcgccaaacaggatgacaaaccggtagccgccgttctggaagcaaccgcgccagatggctattccggtgcgattcagctgctggtgggagccgattttaacggcacggtacttggcacgcgcgtgacagagcaccacgaaacgccagggcttggcgataaaatcgaactgcgcctttctgactggatcacccattttgcgggtaaaaaaatcagtggtgcagatgatgcgcactgggcggtgaagaaagatggtggtgatttcgaccagttcaccggcgcgacgattactccccgcgcggtggttaatgcggtaaaacgcgccggattgtacgctcagacgttaccggcacaactttctcaacttcctgcctgtggagaataaagcgtgagcgaaattaaagacgttattgttcaggggttgtggaaaaacaactctgcgctggtccagttgctcggcctttgtcctctgttggcggtcacgtccactgccactaacgctctgggtttaggacttgcgactacgctggtactgacgctgaccaacctgaccatttcgacgctgcgtcactggacgccagccgagatccgcattcccatttacgtgatgatcatcgcctcggtggtcagcgctgtacagatgctgatcaacgcctacgcctttggcctgtatcaatcattagggatttttattccgctgattgtcactaactgtatcgttgtgggccgcgctgaagccttcgccgccaaaaaaggtccggcgctttcggcactggacggcttttcaattggtatgggcgcaacctgcgccatgttcgtgctgggttcactacgcgaaattatcggcaatggcacattgtttgacggtgcagatgcgctgttaggtagctgggcaaaagtattacgcgtggaaattttccacaccgactcccctttcctgctggcgatgctgcctccaggtgcatttattggcctgggactgatgctggcaggaaaatacctgattgatgaaagaatgaaaaagcgccgtactgaagcagctgccgaacgtgcattgccaaacggtgaaacagggaatgtctgatgaacaaagcaaaacgcctggagatcctcactcgcctgcgtgagaacaatcctcatcccaccaccgagcttaatttcagttcgccttttgaattgctgattgccgtactgctttccgctcaggcgaccgatgtcagtgttaataaggcgacggcgaaactctacccggtggcgaatacgcctgcagcgatgcttgaactgggcgttgaaggggtgaaaacctatatcaaaacgattgggctttataacagcaaagcagaaaatatcatcaaaacctgccgtatcttgctggagcagcataatggcgaggttccggaagatcgtgctgcgcttgaagccctgcccggcgtaggtcgtaaaacagccaacgtcgtattaaacactgcattcggctggccgactattgctgtcgacacgcacattttccgcgtttgtaatcgtactcaatttgcgccggggaaaaacgtcgaacaggtagaagaaaagctactgaaagtggttccggcagagtttaaagtcgactgccaccattggttgatcctgcacgggcgttatacctgcattgcccgcaagccccgctgtggctcttgtattattgaagatctttgtgaatacaaagagaaagttgacatctgaagaaaaggggtaacaccgattaccccattgataacctttctttatcctcttttaaaacttctttttaacgtgaatgatgccattgcttagcgttatcatcaggtaatccgtttgcggataaccaaaaatgcaggttaattgttttttaatagcgaaattttctattcattcgtgatcaagatcacgatgctgtcgcaatgtaaaaacattgcaagaatcaggttaaaatcatttaaatttacacacgcaacaaatattgacctacaaaacattacactggctatttttcagaaactggactatctcactagtaaaaacgctaaatagcagaacatatcgccgttaagccatcacccccctctcagtgcagtgaaaaaatctgccgttacgttttttgaaaaatttaacgctggataacatttcccggaatggttgaattccccgcctcagttatatgtaacagattattacaaaggacttgtctgaaagtgcaagatagtgaacattacctgccgtttcccctcccactataacaattgcgcgtatgttttttagacataacgcgagaaagcacccccgttaatatgggatgtaaaaaaagaggtaaaagtgtccactgcaaaccaaaaaccaactgaaagcgtcagtttgaacgctttcaaacaaccgaaggcgttctatctcatcttctcgattgagttatgggaacgttttggttattacggcctacaaggaattatggctgtttacctggttaaacaactgggtatgtctgaagcgaattcaatcacccttttctcttcctttagtgccctggtttatggtctggtcgctatcggcggctggttaggtgacaaggtactgggtactaaacgcgtaattatgctcggcgctattgtgctggcgattggttatgctctggttgcctggtctggtcacgacgccggtatcgtttatatgggtatggcggctattgcggtcggtaacggcctgtttaaagctaacccgtcttctctgctttctacatgctatgagaaaaacgacccgcgtctggacggtgcattcaccatgtactacatgtccgtcaacatcggctctttcttctctatgattgctacgccgtggctggccgcgaaatacggctggagtgttgcgtttgcgttgagcgttgtaggcctgctgatcactatcgttaacttcgccttctgccaacgctgggttaaacagtacggttcaaaaccagacttcgagcctatcaactaccgtaacctgctgctgaccattattggtgttgtggcactgatcgctatcgccacctggctgctgcacaatcaggaagttgcgcgtatggcgctgggcgttgttgccttcggtatcgtggttatcttcggtaaagaagccttcgcgatgaaaggtgctgcgcgtcgtaaaatgatcgttgccttcatcctgatgctcgaagccattatcttcttcgtgctgtacagccagatgccaacgtcactgaacttctttgcgattcgtaacgttgagcactccattctgggtctggccgtagaacctgagcagtatcaggcactgaacccgttctggatcatcatcggtagtccgattctggccgctatctataacaagatgggcgataccctgccgatgccaaccaagtttgcaatcggcatggtgatgtgttctggtgcgttcctgattctgccgctgggtgcgaaattcgcgtctgacgctggtatcgtgtctgtaagctggctggtcgcaagctatggcctgcagagcatcggggaactgatgatctctggtctgggtctggcaatggttgcacaactcgttccgcagcgtctgatgggcttcattatgggtagctggttcctgaccactgccggtgcaaacctgattggtggttatgttgcgggtatgatggctgtgccggataacgttaccgacccgctgatgtcactggaagtttatggtcgcgtattcttgcagattggtgtcgctactgccattattgcagtactgatgctgctgaccgcgcctaaactgcaccgtatgacgcaggatgacgctgcagacaaagcggcgaaagctgctgtagcgtaaaattcagggaaactcttttacaagccgctaacttttcgttagcggcttttttttgttcagcaacgcactaccatactttaaaccacagacaaaaggagttaccgatgaaattgttctacaaaccgggtgcctgctctctcgcttcccatatcaccctgcgtgagagcggaaaggattttaccctcgtcagtgtggatttaatgaaaaaacgtctcgaaaacggtgacgattactttgccgttaaccctaaggggcaggtgcctgcattgctgctggatgacggtactttgctgacggaaggcgtagcgattatgcagtatcttgccgacagcgtccccgaccgccagttgctggcaccggtaaacagtatttcccgctataaaaccatcgaatggctgaattacatcgccaccgagctgcataaaggtttcacacctctgtttcgccctgatacaccggaagagtacaaaccgacagttcgcgcgcagctggagaagaagctgcaatatgtgaacgaggcactgaaggatgagcactggatctgcgggcaaagatttacaattgctgatgcctatctgtttacggttctgcgctgggcatacgcggtgaaactgaatctggaagggttagagcacattgcagcatttatgcaacgtatggctgaacgtccggaagtacaagacgcgctgtcagcggaaggcttaaagtaatatccatcggcccacaggtcgttgtgggccgaaatgagatatttcagagctttgttgcgctgaagtaatgttctggtttggcaatacgatcctgagcagccaccacttgcagctcatattcctgcattgctttggtggtcaccatgatttcgtagactgcagcggtcacatgttccagcgcctcctgcagcgttgccccctgaagcagtttcaccagcagtaaaccgctcgtcacatcaccaacacctaccggctggcgcataccaaaatccaccagcggacggctgatatgccaggcttcatcggcggtgaccagcagcatttcaaaacggtcacggctgtagccagctcgcgccaggtgtttaaccaacacaatttgtggcccttgcgcaatgagttcgcgcgctgccagaaccgcttcttcgacgttatttaccgcatgctcacagagtatttccagctcaaccagattcggcgcaatgatatcgctggcaggcaaaccgtgccgcacatgaaactctgcgacacccggtgcaacgatacagcctttttccggatgacccattaccggatcgcaaaaatatttcgcctgcggattcgcggctttcacctgacggacgataccgaggatatgttcaccctgctccgccgatcccagatagccacttaacacggcatcacaggtgtgtaatttatcaatggcggcaatgccttgcacaatttcggttaaatggctgggcggcatcacgcagccagtccatttgccgtattgggtgtgattagaaaattgaacggtgttcagcggccagacgttcgcgcccaggcggcgcataggaaactctgccgcactgttacccgcatgaccataaacaacgtgagactggatagcgagaatatttttcatcatgttccctgtataaaaaccagggggagtgatttctcactccccctttccacttaatgcattatttccagcaaatcagacagtaattctttttgccgcgacgcagtaaggtaaaacgaccaaacagacgatcttcttctttaaagaagtattcaggatcggactgtttttcaccgttaatggtgatggcattggaggcgatagttttacgcgcctgaccacgggaaggttgcagttcagaatcgaccagcgcctgcatcaggtctgcgcccttttccatctcaaccatcggtacgccgtcctgcgccagctgttcgaagtccgcttcactcagcgcactcaaagaaccgctgaacaggcattcggtaatacgttttgccgcctgtaaaccgtcttcaccgtgaaccagacgagtcacctgctccgccagtacatactgggcgcgcggtgctttaccgctgtttttatcttcttcttccagggcgttgatctcttcaatgctcataaaggtgaagaacttcaggaagcggtaaacgtcggcatccgcagtgttgatccagaactggtagaatttgtacgggctggttttcttcggatccaaccagactgcgccgccttcagttttaccaaatttggtgccatctgctttagtgatcagcggaacggtcaggccaaacacctgattctgatgcagacgacgggtcaggtcgataccagaagtgatgttaccccactggtcagaaccaccaatttgcagcaccacaccgtactgtttgttcagacaggcgaagtcataaccctgcaacaggttgtaggaaaactcagtgaacgaaatcccctgatcttcacggttgagacgctgcttaaccgcttctttgttgatcatctggttaacggagaagtgtttgccaatatcgcgcaggaaggtcagcacattcatattgccgaaccagtcatagttgttcgccgcgatagcagagttttctccacagtcgaaatcgaggaacggggcaacctgcttacggattttgtccacccactcctgaacagtttcttcggtgttcagcttacgctcggcagctttgaagctcgggtcgccaatcagacccgtcgcgccgcctaccagcgcaaccggcttgtggcccgcctgctggaagcgtttcaggcataacaatggaacaagatgccccaaatgcaagctgtcagcggtaggatcgaagccgcaatagagcgcgatcgggccttgcgccagtcgctctgctaacgcttcctcgtccgtcacctgggctaccagcccccgctcttgcaattgtttaatcaagttactgcttgccatcaaaatctccatgtatataacgactgcacctttgccggtacacgacttttcgccagatgcgaaagagacatagaataaagtgccagaatcaggagtaccagcgattaaagcaagatttttgcatcttttcagggtgcaagacgatcaatcttccacgcatcattttctcgctggtacaaaaagcggtcatgcaggcgatgctcaccgccctgccagaactcaatctgttcaaggctgacgcgaaaaccgccccaaaagctcggcaatggcacttcgccctgttgaaacttctgcttcagctccaggaatttactttcaaggataccgcgggcagaaatgcgactggactgcttcgaaacccatgcaccaatctggctatcacgcgggcggctatgaaaatatttcatcacttcgagagtcgaaagtcgttctgctttaccgatcaccatcacctggcgttcaagggtatgccacgggaacagcaggctaacgcgcggattattttcaatttgatgtgctttacggctaccgaggttggtgtaaaacaccatgcctttttcgtcgtaatgtttgagtaaaacgatgcgttgataaggctgagcatgttcatccacggtagcgaccaccatcgcggtagggtctgccagtttggcttcacacgcctgagagagccaacgttcaaaaagggttaatggatcggcgggaagatcgcgacggcgtaacccgcctttggtgtattcacggcgcagatgcgcgatttgctgcaattcgtcgttatcagacatggttttctttacggattgtcagtgggtgacgctattgtgcgccgcccctggaaaaatctcaacgctgtggattttgtaactgacagttattcaatacgatgcggtcgcgtttatagacagtcgcttcatcgcctttcgaccagaaaacatagattccgtcagtgtaacgtgcaccagacgctgaaatgccctgtttgagatgcagtagttgattatcgtaaacaaaactgacttcctggcgcggattattcagtttgaccgtcaacggtttttcatcacactggtattccagcgtagcggtttgcatgtgctcaaccagttgattgaacgcgctacagccggtgagaagcaccggcaaacagatcagtaacagttttttcatagacatttcccgaagactttcctggtctggagggcaatacgccctccctaacgttccaagtgtaacggcagacgcggtaagaaaaattcagttaactctgatatcacgggttagcagggaaaatagcccccagtaccgtctcctggcttgcgccagtgacggaaggcagatttcctggtaatcccgccagcgtccgccaggcaagccaggcgaaagccaatgcttccatgtcatcgccactaatgccaacggcatcggtggtggtgacttctgtgcctggcagtaatgccgccagacgcgccatgagtagcggattacgactacctccaccacataccatcaatcgttcgcagccaccgctcaacaaaacttgttcagaaatggtcacggcggtgagttctgccagtgtggcctgaacatcacggggatcaacacccggaaaatggcgtaaatggcgctccagccagccgtagttaaagtattcgcgtccggtgcttttcggtgcaggttgcgagaaatatgggtcgctgagcatattttgcagcagtgggagaataactttacccgcccgtgcccactcggcatctttatcgtaaggtttaccggcctgacgccagatccaggcatccatcagcatgttaccaggaccggtatcgtagccgccaaccggctgcccaggaatgagcagtgacagattggcgatgccgccaatattgagcaccattcgtcgctcggttgggtgacccagcaaggcatgatggaacgcaggtaccagcggtgcgccttgtcctcccaaggcaatatcgcgacggcgaaaatcaccgacaaccgtaattccggtgcgtgccacaatttgattgttatcgccaatctgtaaagtgtgtggttccacgcccgtcggttcatgccagacggtttgaccgtgacagccgatcgcaactatatctctcgcctgcaggttttgttccttaagcaaggcattgaccgcatcagcaaaaagtcgcccgagttgagtatcaagctgtccaaactgcgaaagtgtaagctgctggccctggcaaatatccagtacagcctgtttcagagacaccgggatcggccagctcaagcttgccagctgtgcgacccggtgttcatctattgtcgccaacacaacatcaacaccatcaaggctggtgcctgacataacgccaataaagcggcccgatttcatagttcatcctttttcaatctgacgtttgcgcaccactcaaacataaacttttcgtgaataccatgcggaatgaccgatttttaccgttggtagtaaaacattatcttcaaatcaataatcatcatgaatgttttgtttataattggttgatcctactttcattatgatttgctcatatttggtagaacatgtaaccatggattcacatatgccatatactttgaccatgagggatgcttgcgtggcgtttcatggtgaacaggagatttttcaatgattaaacgcgtattggttgtttcaatggtaggtctgtctcttgtcggttgtgttaataacgacaccctgtcaggggatgtttataccgcttctgaagcgaaacaagtacagaatgtcagctatggcaccatcgttaacgtacgtccggtacagattcagggcggtgatgattccaacgttatcggtgcaattggcggtgctgttcttggtggtttcctggggaatactgttggtggcggaaccgggcgttctctggctactgcagcaggcgctgttgcaggtggcgtagctggtcagggcgtacagagtgcaatgaacaaaacgcagggtgtcgagctggaaattcgtaaagacgatggtaataccatcatggtggtacagaaacaaggcaacactcgtttctctccgggccaacgtgtcgtactggccagcaatggcagtcaggtgaccgtttctccgcgctaaataagtttgcgtgtggtcaggttactgaccacacgcccccttcatttcaccctttggcctgtaactcaatgatattatgctcaagttttgcgatgagcgtaatcagttgctccagttcctctgcggagatgccatgtaatatttccgcgcgggttttgttaataacagcttccatttcgctgatcagtggctctgccttttccgtcagtttaatacgtttagcccgacgatcgctggcacaagtttgacgcgaaattaaccctttttcttccagttggtccagagtacggaccagtgatggctgctcgatgccaatcgcttttgccagttgaatttgcgactggtctggaggtaactgatggatattgtgtaacgtaacccaatgggtttgtgttaactccagcggtttcaggcgatggtctatcagagcacgccatatgcgcaccaaccgtgccagatcagaacctagtggcgattccaatttcatctccttataattagcttgctaagatattatgcggcttttagaatagtgtgcagcaattgtattgctaaaacaaatgtattgctgcatttggttaccgtcagacatatttttcagaaattgcgcgtaaatttttcgcacttaaagaatatttattaatctaacgcaatatattcggtcgtaaaggaatctactttgtgaagtttatgctcaatgcaacaggattgcccttacaagatctggtgttcggtgcgtccgtctattttcctccgtttttcaaagccttcgcgtttggattcgtcatctggcttgtcgtacaccgcctgcttcgtggctggatctacgccggtgacatctggcatcccttgttaatggatttatcgctgtttgcgatttgcgtttgccttgctctggcaatactgattgcgtggtaactatgtcaattaaaacaattaagtatttctcaacaatcattgtagcgatagttgcggttcttgccggatggtggctgtggaattattacatgcaatctccgtggacacgcgacgggaaaatacgcgcagaaaaggtttctatcaccccacaggtgtcgggacgtattgttgagctgaatataaaagacaaccaactggttaacgcgggggatcttctgctcacgatcgataaaacgccctttcagatcgccgagctgaacgcacaggctcagctggcgaaagcgcaatctgacctcgcaaaagccaataacgaagcgaatcgtcgtcgtcatctctcacaaaattttatttctgccgaagaactcgataccgctaacctcaatgttaaagcgatgcaggccagtgttaatgccgcacaggccacgctgaaacagacacaatggcaactggcgcaaacggaaattcgcgccccggtgagtggttgggtgactaacctcactacccgcatcggcgattacgctgacaccgggaaaccgctgtttgcccttgtcgacagccactcgttttacgtcattggttatttcgaagaaaccaagttgcgccatatccgcgaaggtgcaccagcacaaattaccctctatagtgataacaaaacgttacggggtcacgtttccagtatcggtcgggcgatttatgatcaaagcgttgaaagtgactcaagccttattccggatgtgaaacctaacgtcccctgggttcgtctcgcccaacgcgttcccgtccgctttgcgctggataaagttccaggcgatgtcacgctggtgtcgggcaccacctgtagcattgccgtaggtcaataatgaacgcatcgtcatggtccttgcgcaatttgccctggttcaaggccacgctggcgcaatggcgttatgcgttacgcaataccattgccatgtgtctggcgctgacggttgcctattatttgaatctggatgaaccctattgggcgatgacctcggctgcagtggttagctttcccaccgttggcggtgtcatcagcaaaagcctcggacgcatcgctggcagtttactgggagccattgcggcactgcttcttgccgggcatacgctcaatgagccgtggttttttctattgagcatgtcggcgtggcttggcttttgtacctgggcctgtgcgcacttcacgaataacgtcgcgtatgcatttcaactggcgggctacacggctgccatcatcgcctttccgatggttaatattactgaggccagccagctgtgggatatcgctcaggcgcgcgtttgcgaggtgatagtcggtattttgtgcggcggcatgatgatgatgatcctgcctagcagttccgatgctacagcccttttaaccgcattgaaaaacatgcacgcccgattactggaacatgccagtttactctggcagcctgaaacaaacgatgccattcgtgcagcacatgagggggtgattgggcagatactgaccatgaatttgctgcgtatccaggctttctggagccactatcgttttcgccagcaaaacgcgcggcttaatgcgctactccaccagcaattacgtatgaccagtgtcatctccagcctgcgacgtatgttgctcaactggccctcaccgccaggtgccacgcgagaaattctcgaacaattgctgacggcgctcgccagttcgcaaacagatgcttacaccgtcgcacgtattatcgccccgctacgcccgaccaacgtcgccgactaccggcacgtcgccttctggcagcgactacgttatttttgccgcctttatctgcaaagtagtcaggaattacatcgtctgcaaagcggtgtagatgatcatgccagactcgcacggacatctgctctggctcgtcataccgacaacgccgaagctatgtggagcgggctgcgtacattttgtacgttgatgatgattggcgcatggagtattgcatcgcaatgggatgccggtgccaatgcattaacgctggcagcaattagctgcgtactctactccgccgtcgcagcaccgtttaagtcgttgtcactgctgatgcgcacgctggtgttactttcgctattcagctttgtggtcaaatttggcctgatggtccagattagcgatctgtggcaatttttactgtttctctttccactgctggcgacaatgcagcttcttaaattgcagatgcccaaatttgccgcactgtgggggcaactgattgtttttatgggttcgtttatcgctgtcactaatcccccggtgtatgattttgctgattttcttaacgataatctggcaaaaatcgttggcgttgcgctggcttggctagcgttcgccattctgcgtccaggatcggatgctcgtaaaagccgccgccatattcgcgcgctgcgccgggattttgtcgatcagctaagccgccatccaacactgagtgaaagcgaatttgaatcgctcacttatcatcacgtcagtcagttgagtaacagccaggatgcgctggctcgccgttggttattacgctggggtgtagtgctgctgaactgttctcatgttgtctggcaattgcgcgactgggaatcgcgttccgatccgttatcgcgagtacgggataactgtatttcactgttgcggggagtgatgagtgagcgtggcgttcagcaaaaatcactggcggccacacttgaagaattacagcggatttgcgacagccttgcccgtcatcatcaacctgccgcccgtgagctggcggcaattgtctggcggctgtactgctcgctttcgcaacttgagcaagcaccaccgcaaggtacgctggcctcttaattacttaattacaccacaggcatagcgttcaccgccaccgcccagcggtttaggttgatcggacatattatcgccgccaacgtggaccatcagcgctttgtctttgatttcatccagtgatttcagacgaggcgcgatgacggcatcggtagctttgccgtcattattgacgaccagtgcaggcagatcgcctaaatgcccggcaccttctggcccttcatgtttaccggtattttgtggatcaagatgcccgcctgcggattccgcggcgctggctttgccatctttggtggctggctggcagcttcctttggcatgaatatggaagccatgttcaccggggggtaatgctttcagatcgggcgaaaactccagacctttatcggtttcagtaatggtgacgctaccaattgactgccctacccttgcgacgtgacgaggttcatctcgactttttcactggcagcttgtgcgccggttgcaacaaccagcgccagaatagccagactaaaacgtttcataggacctccgttcattgtgcattcctgaataagtgtaaaccagtgacacatttttgaacggcggctattcctaaaagtgcttacggtacgtcgtaccccagtgccgctttacggatacgaaaccattgttgacgggtcattttcagtgtttctgcttcgacagctgcccgtacgcgctcaattttacctgaaccgataattggcagcggctgcgatggtaaacgtaatacccaggcgtaaaccacctgttcaatcgagcccgcgtttaactcctctgccaccacagccagttcatcacgcagctgctggaaataatcatcattaaacagacgaccaccaccaaggcaggaccacgccatcggacgaacacgcagttgttgtagttggtcgagcgtgccatccagcagtaacggctgatgcaccggggatatttccacctgattagtggcaagggtaaacggcagacgtgattgcaacagggcaaattgcgcaggcgtaaagttcgatacgccaaaatgacgcactttgccgctctgatgcagatgtttgaacgcgtccgccacttcatcggcatccattaacgggtctggtcggtggattaacagcagatccagatgatcggtcgcgagattaattagcgactgttcggcgctcttaatgatgtgatcgcggtcagtgatgtaatgaccaatgacgttttcttcacgcgcggtcgtcgcgataccgcatttactgacgatttccatccgttcacgcaggtgaggtgccagtttcagtgcctcgccaaacgccgcttcgcactgatagccaccataaatatcagcatggtccacggtggtcacgccgagatccagatgctcttcaataaaactgaccagctggcgggcggacatattccagtccatcaatcgccagtagcccatcacaaaacgggaaaactccgggccttgcggcgcaatagtaatacgctgaaccataatcacttcctcttatcagatatgagaggagtatacgcaagattaggttcaaaagagtgatggttgctccggttcgtctgatgacgctggcttatttgcgcgtaatttgcgcattaatcgctgccgacaaaggcgcagcacctcttgtttttcgccatcgctcattttattccagttaaaacgctcatcacgactacgaaaacagccgcgacaaaacccgcgttcgtcagactggcaaattccccggcacgggctctggacgggaaagaactctaattgctccgccacttcgccctcctcagataagattattaccattattgaagctgttaatgtccaaagtagcaactttgcttgcactagaccgactggtctactacactccaacgcatgaacaaacacaccgaacatgatactcgcgaacatctcctggcgacgggcgagcaactttgcctgcaacgtggattcaccgggatggggctaagcgaattactaaaaaccgctgaagtgccgaaagggtccttctatcactactttcgctctaaagaagcgtttggcgttgccatgcttgagcgtcattacgccgcatatcaccagcgactgactgagttgctgcaatccggcgaaggtaactaccgcgaccgcatactggcttattaccagcaaacactgaaccagttttgccaacatggaaccatcagtggttgcctgacagtaaaactctctgccgaagtgtgcgatctgtcagaagatatgcgcagcgcgatggataaaggtgctcgcggcgtgatcgccctgctctctcaggcgctggaaaatggccgtgagaaccattgtttaaccttttgtggcgaaccgctacaacaggcacaagtgctttacgcactgtggcttggcgcgaatctgcaggccaaaatttcgcgcagtttcgtgccactggaaaacgcgctggcccatgtaaaaaacattattgcgacgcctgccgtttagcaggcattttttatcaccagacgaccgggagcctttatgtcatctgaaaaactgtattccccactgaaagtgggcgcgatcacggcggcaaaccgtatttttatggcaccgctgacgcgtctgcgcagtattgaaccgggtgacattcctaccccgttgatggcggaatactatcgccaacgtgccagtgccggtttgattattagtgaagccacgcaaatttctgcccaggcaaaaggatatgcaggtgcgcctggcatccatagtccggagcaaattgccgcatggaaaaaaatcaccgctggcgttcatgctgaaaatggtcatatggccgtgcagctgtggcacaccggacgcatttctcacgccagcctgcaacctggcggtcaggcaccggtagcgccttcagcacttagcgcgggaacacgtacttctctgcgcgatgaaaatggtcaggcgatccgtgttgaaacatccatgccgcgtgcgcttgaactggaagagattccaggtatcgtcaatgatttccgtcaggccattgctaacgcgcgtgaagccggttttgatctggtagagctccactctgctcacggttatttgctgcatcagttcctttctccttcttcaaaccatcgtaccgatcagtacggcggcagcgtggaaaatcgcgcacgtctggtactggaagtggtcgatgccgggattgaagaatggggtgccgatcgcattggcattcgcgtttcgccaatcggtactttccagaacacggataacggcccgaatgaagaagccgatgcactgtatctgattgaacaactgggtaaacgcggcattgcttatctgcatatgtcagaaccagattgggcggggggtgaaccgtatactgatgcgttccgcgaaaaagtacgcgcccgtttccacggtccgattatcggcgcaggtgcatacacagtagaaaaagctgaaacgctgatcggcaaagggttaattgatgcggtggcatttggtcgtgactggattgcgaacccggatctggtcgcccgcttgcagcgcaaagctgagcttaacccacagcgtgccgaaagtttctacggtggcggcgcggaaggctataccgattacccgacgttgtaatccaacattgcgagcggcgtaaagccgccgctatactaaaacaacattttgaatctgttagccattttgaggataaaaagatgcgtcttcttcataccatgctgcgcgttggcgatctgcaacgctccatcgatttttataccaaagtgctgggcatgaaactgctgcgtaccagcgaaaacccggaatacaaatactcactggcgtttgttggctacggcccggaaaccgaagaagcggtgattgaactgacctacaactggggcgtggataaatacgaactcggcactgcttatggtcacatcgcgcttagcgtagataacgccgctgaagcgtgcgaaaaaatccgtcaaaacgggggtaacgtgacccgtgaagcgggtccggtaaaaggcggtactacggttatcgcgtttgtggaagatccggacggttacaaaattgagttaatcgaagagaaagacgccggtcgcggtctgggcaactaatctcctgccgggcgtgaactcatcgcgcccgcatctttactgcatcgacaagtaatatttgtcataatgcgcgctgcaatttatccgtattaagagaatcagatgtccgataacgctcaacttaccggtctgtgcgaccgttttcgtggtttttatcctgttgtgatcgatgttgaaacagccggatttaacgccaaaaccgatgcgctgcttgagattgccgccatcaccctgaaaatggatgaacaaggctggctgatgccggacaccacattacatttccacgtcgaaccatttgtcggcgcaaatttgcagccagaggccctcgccttcaacggcattgacccgaacgatcccgatcgcggcgcggtcagcgaatacgaggcgctgcacgaaatttttaaagttgtacgtaaaggtattaaagcgagcggctgtaaccgcgccattatggtggcgcacaatgccaattttgatcacagctttatgatggccgccgcagaacgcgcctcactgaaacgtaacccgttccaccctttcgccacttttgacactgctgcactggccgggctggcactcggacaaaccgtattgtcaaaggcttgccagaccgctggcatggacttcgacagcacccaggcgcactccgcgctgtacgacaccgaacgcactgctgtgctgttttgtgaaatcgtcaaccgctggaaacgtctgggaggctggccgctacctgccgccgaagaggtgtaatcgagtcgatgcctgatgacatgcaatgattcaggcatctatagtgaggctattccacgcatcaagcatgatattcacggggaatagcgttaatggcagataatccagacccttcatcgctcctgccggacgtgttttcaccggcgacccgcgactggtttcttcgcgcctttaaacagccgaccgctgtccagtcgcaaacctggcatgtggcggcgcgaagcgaacatgcgctggtgattgcaccgaccggctccgggaaaacgctggcagcatttctctacgccctcgatcggctcttccgcgaaggcggcgaagatacccgcgaggcgcataagcgtaaaacctcacgcatcctctatatttcaccgataaaagctctgggcaccgacgttcagcgcaacttgcagctcccgttgaagggtattgccgatgaacggcggcggcgcggcgaaacggaagtcaatcttcgcgtagggatccgtactggcgatacgcctgcacaggaacgcagcaaactcacccgtaatccgccggatattctgatcaccacacccgaatcactctatctgatgctgacctcccgcgcgcgcgaaacgctacgcggcgtcgaaacggtaattattgatgaagtccacgcggtagcgggcagtaaacgtggtgcgcatctggcgttaagtctggagcggctcgatgcgctgctccacacctcagcacagcgaattggcctttctgccactgtgcgctcagccagcgatgtggcagcatttcttggtggcgatcgcccggttacggtagtcaacccgcccgcaatgcgccatccgcagatacgaattgtcgtaccggtcgccaatatggatgatgtctcatcggtcgccagcagcaccggcgaagacagccatgccggccgggaaggctccatctggccatatattgaaacgggtatccttgatgaagtgttgcgccatcgctcgaccattgtctttactaattcacgtgggctggcggaaaaactgacggcacgattaaatgagctttacgccgcacgcttacagcgttccccgtctatcgccgttgatgcggcccatttcgagtcgacctccggcgcaacctctaaccgtgtacaaagtagcgacgtttttattgcccgctcacaccacggctccgtctctaaagaacaacgagcaatcaccgagcaggcgctgaaatcgggtgagttacgctgcgtggtcgcaacctccagtctcgaactggggattgatatgggcgcagtggatctggtgattcaggtggcaacgccgctttctgttgccagtgggttacaacgcattggtcgcgccggacatcaggttggcggtgtatctaaagggctgtttttccctcgtacccggcgtgacttagtcgattccgcagtcattgtagagtgtatgttcgcaggcaggctggaaaacctgacaccgccgcataatccactcgacgtccttgcgcagcaaaccgttgccgccgcggcgatggaggcattacaggtagacgaatggtactcccgcgtacgccgtgccgcaccgtggaaagatctgccaagacgtgtttttgacgccacgctggatatgctttccgggcgctatccctctggcgatttttctgcttttcgccccaaactggtctggaacagggagaccgggatattgaccgcccgacctggcgctcaattgttggcggttaccagcggcggcaccattccggatcgtggcatgtatagcgtgttattacccgaaggtgaagaaaaggccggttcgcggcgggtgggtgaactggatgaggagatggtatatgagtcgcgggtgaacgacattatcactctcggcgctacctcatggcggatccagcaaatcacccgcgatcaggtgattgtgactcctgctccgggtcgttctgcccggctccccttctggcgtggtgaaggtaacggacgtccggctgaattaggcgagatgatcggcgattttcttcatttgctggcggatggcgcgttcttttccgggactattcccccgtggctggcagaagaaaatacgaacgccaatattcaggggttgattgacgagcaacgcaacgcgacgggcatcgttccggggagtcgccatctggtcctcgaacggtgccgtgatgaaattggcgactggcgtattattttgcactctccctatggaagacggtgcatgaaccctgggcgctggcgattgccgggcgaatacatgccctatggggcgctgacgcgtctgtggtcgccagtgatgacggcattgttgcgcgcattcctgacactgatggtaaattgcccgacgccgcgatttttttgtttgaaccagaaaagttgctgcaaattgtccgcgaggcggtaggcagctcggcacttttcgccgcccgttttcgcgaatgcgccgcgcgggcattattaatgccggggcgcactccgggccatcgcaccccgctttggcaacaacggctgcgcgccagtcagttgctggaaatcgctcagggatatccggattttccggtcattctcgaaaccctacgcgaatgtctgcaagatgtttatgatcttcccgcactggaacgtttgatgcgtcgcctgaacggtggcgaaattcaaatatccgatgtaacgaccactacgccctcgcctttcgccacaagtttattgttcggctatgtcgcggaatttatgtaccagagcgacgccccgctggcagagcgccgggcatccgtactgtcgctggacagcgagttactgcgcaatctactcggacaggtcgatccgggggaattactcgacccgcaggtcattcgccaggtggaagaagagttgcaacgactggctcctggcagaagagcgaaaggtgaagaaggattgttcgacctgctgcgcgaactggggccaatgaccgttgaagacctggcgcaacggcatacaggcagcagtgaagaggttgcgtcgtatctggaaaatcttcttgcagtaaaacgaatcttcccagcgatgattagcggacaggagcgtcttgcctgtatggatgatgccgccaggctgcgtgatgccctcggcgtacgactaccagagtcattgccagagatttatttacatagagtcagttacccgcttcgcgatctctttctgcgctatctccgggctcatgctctggtcacggctgaacaactggctcatgagtttagtctcggtattgccattgtcgaagagcagcttcagcaactgcgtgaacagggtctggtgatgaatctgcaacaagacatctgggtgagcgatgaagtatttcgtcgtctgcgtttgcgctcgctgcaagccgccagagaagcgacgcgtcccgttgcagccacgacctatgcgcgattgctgctggaacgtcagggcgtattacccgccaccgatggtagcccggcgctctttgcctcaacatcgccaggcgtttatgagggcgtagatggcgtgatgcgggtgatcgaacagcttgccggagtcggtttacccgcctcactctgggaaagccagatcctgcctgcccgcgtacgcgactattcgtcagaaatgctcgatgaattactggcaaccggtgcggttatctggtcggggcaaaaaaaactgggtgaagatgacggcctggtggcactgcatctacaggaatatgctgcagaatcgttcactcccgccgaagcggatcaggcgaatcgttcggcgctgcaacaagcgatagtcgctgttctggctgacggaggagcctggtttgcacaacaaatcagccaacggatacgcaacaaaatcggcgaatcggttgatctctctgccctgcaagaggcgttatgggcgctggtctggcaaggcgtcatcaccagcgacatttgggcaccgttacgcgccctcacccgcagcagttccaacgcacgcacctcaactcgccgcagtcaccgggctcgtcgtggacgtcctgtctatgcgcaacccgtctcgccgcgggtatcttacaacacaccaaatctggctggacgctggtcgttattgcaggtggagccactaaacgataccgaaaggatgctggcgctggcggaaaatatgctcgaccgctacggcatcatcagtcgtcaggcggtgatagccgaaaatatccctggcgggtttccatcgatgcaaacgctttgtcgaagtatggaagactccgggcgaattatgcgaggtcgttttgtagaaggtctgggtggcgcgcaattcgctgaacgtctgactattgaccgattgcgcgatctggcgacacaagccacgcaaacgcgccactatacaccagtggcgctctctgccaacgatccggctaatgtgtggggaaatcttctgccctggcctgcacatccggcaacgctggttccaacgcgtcgggcgggtgcgctggtggtcgtttctggcggcaaattgttactctatctggcgcaaggtggcaaaaaaatgctggtctggcaggaaaaagaggaattactcgccccagaggttttccacgcgctgactaccgcactgcgtcgcgaaccacggctgcgctttacgctaacagaagtgaatgatctaccggtccggcaaacgccgatgtttacgctgctgcgtgaggcgggattttcaagttcgccacaagggctggattggggatagagaaaggactgacggatgcccgttcgcatccgtcagtattgcaggacggattattccgcgtcgggctcttcagacttgtatttagcggcagtttctttgatcagctgctgcagttcgccacgctgatacatttcgatcacgatatcacaaccgccgaccagctcgccgtcaacccacagttgcgggaaggtcggccagttagcatatttcggcagttccgcacgaatgtccggattctgcagaatatcaacataggcaaaacgttcgccacatgcggcaagcgcctggactgcctgggcagagaaaccgcagctcggcagtttcggtgaacctttcatgtacagcaggatcgggttttcagcaatctggcgttggattttttcgatagtggtgctcattgtcttgcttcctcaaacttctttacggcagtaatctgacattgtagcgggtcagtgcggcatcggaaaataacattttcatcacgcttttgctattttatccctttgctctatttgttgcatttcaaatattcgtttcttctctgatgccggcaaactggcgtatttacaaccatttttagctttcactgctacatttttttgcgctcgccaacgaaacgtattttttaacaataaaagctattaactttctcttcttctatgcattagaatcatcaagtttgtaaatcagacgcaggcatgatagacctgccttaacagagggacgctcagtggcgcggataaaccgtatttcgatcacgctctgtgctttactttttaccaccctgcctttaacgcctatggcccatgcttcaaagcaagccagggagagttctgctaccactcatatcaccaaaaaagcagataaaaagaaaagcacggcaaccaccaaaaagacccagaaaacagcgaaaaaagccgccagtaaaagtacgaccaaaagcaaaaccgcttcttccgttaaaaaatcttccattaccgcttctaaaaacgccaaaactcgcagcaaacacgccgtcaataaaacggcctcagccagctttaccgaaaagtgtaccaaacgtaagggctataaatcgcattgtgtgaaagtcaaaaatgccgcgtcaggaactcttgccgacgcgcacaaagcgaaggtgcaaaaagctacgaaagtggcaatgaataaactgatgcagcaaattggtaagccatatcgttggggtggcagctcaccgcgtaccggttttgattgcagcggcctggtttattacgcttataaagatttggtgaaaattcgtattccgcgtacggcgaatgaaatgtatcacctgcgtgatgcagcgccaatcgaacgtagtgaactgaaaaacggcgacctggtctttttccgtactcagggacgcggcacagccgatcatgtcggcgtgtatgtcggcaacggcaaatttattcagtcaccgcgcacaggtcaggaaattcaaatcacttctctcagtgaagactactggcagcgccactatgttggcgctcgtcgggtaatgaccccaaaaacacttcgctaaaactttaccctgttgttacggcaacagggtaagttcatcttttgtctcaccttttaatttgctaccctatccatacgcacaataaggctattgtacgtatgcaaattaataataaaggagagtagcaatgtcattcgaattacctgcactaccatatgctaaagatgctctggcaccgcacatttctgcggaaactatcgagtatcactacggcaagcatcatcagacttatgtcactaacctgaacaacctgattaaaggtaccgcgtttgaaggtaaatcactggaagagattattcgcagctctgaaggtggcgtattcaacaacgcagctcaggtctggaaccatactttctactggaactgcctggcaccgaacgccggtggcgaaccgactggaaaagtcgctgaagctatcgccgcatcttttggcagctttgccgatttcaaagcgcagtttactgatgcagcgatcaaaaactttggttctggctggacctggctggtgaaaaacagcgatggcaaactggctatcgtttcaacctctaacgcgggtactccgctgaccaccgatgcgactccgctgctgaccgttgatgtctgggaacacgcttattacatcgactatcgcaatgcacgtcctggctatctggagcacttctgggcgctggtgaactgggaattcgtagcgaaaaatctcgctgcataataactgatggcaaatgcagcattgcctgatgcgcttcgcttaccatgccaacgcggatgaggcgttaacagcgcattcggcaagataaatcgcacgttgtcagcaactgtaacgcagaaggttatccttctgcgtttttgtttaattagctgttagcaacgcaaactgtttcaggttgttttctggctgacataaacaccagcaataatgccagtcccgcgacaatcgctcccatcaccggcacaaagctgtatcccagcccagcggaaattaccgcaccaccagcagctgctcccagcgcatttccaagattaaaggcaccaatattgactgatgaagacagacccggcgcttcactggcgacacgcatcacgcgcatctgtaacggcggtacgaccgcaaaggttgctgcgccccacaccaccatgctaatagctgcgccgaactcattgcgggccaggaacgggattgccagcataatcaccatcaacaacaacaaaaagcctttcaacgtgccgttaactgaacgatctgccagtttgccgccgagatagttaccgatagagaatccgacaccaatcagcaccagcattgccgtgacgaacactggtgttgcgtgggtaatactttgtagtaccggagagatataggtgtagagagtaaacattgcaccagctcccagtaccgtcgtcagcaatgcagacagcacctgcggacgcattaataccgccagctcttttttcacttcaggtcgtgcccctgcaccacctttaggtaatgagaagaacagacttaccattgaaatcactcccagccccgccgttgccagaaatgacatccgccagccgatggtttcacccaaccaggtcgccgccggcacgccaccgatatttgccagggttaaccccataaacatagtggcaactgcgctggcctgtttatgttttggcaccacgcttgcggccacgactgaacccaaaccaaaaaatgctccgtgattcaggctggtcaaaatgcgtgaaagcatcagggtcatataatccggcgcgatggcggaaagtacgttgccgagcgtgaaaattgccatcaggaaaatcaacgcactgcggcgggcacgatgagaaagtagaagcgtcatcagcggcgcgccaaccattacgccaactgcataggcactgattaacattccggcagcgggaatcgagacatccacaccgcgcgcaatgacgggcaacaaacccattggcgagaactccgttgtcccgataccaaacgcgccaatcgccagcgccagcaacggatagttaattttcatgccttatctccacctcttcgcgtcattacgcgatattcattaaagtggcgaaagcatgacagcaatcacaaaaaaatgaaaataacaaaaagagaaaacacttttgccattttgctaacaaacaggaaggagatgcgagggagaacgcgctccctcgagaggaaatcagtgcagcgcggcagtcaaacccacggctacgatcaaaccgaggacgataatcgttgttaccagtgaaaatttaaggtcggtgctcatcaagttttctccttttttattaccacacaaaaagtgatattacgcatttttacacactgtgatgaaaaaatctcccgtcatttataatgataagtgtttttaccacttccccttttcgtcaagatcggccaaaattccacgcttacactatttgcgtactggccattgaccccttcctgacgctccgtgtcgtttttccggcgtaccgcaacacttttgttgtgcgtaaggtgtgtaaaggcaaacgtttaccttgcgattttgcaggagctgaagttagggtctggagtgaaatggaatggcaacaataaaagatgtagcgaaacgagcaaacgtttccactacaactgtgtcacacgtaatcaacaaaacacgtttcgtcgctgaagaaacgcgcaacgccgtgtgggcagcgattaaagaattacactactcccctagcgcggtggcgcgtagcctgaaggttaaccacaccaagtctatcggtttgctggcgaccagcagcgaagcggcctattttgccgagatcattgaagcggttgaaaaaaattgcttccagaaaggttacaccctgattctgggtaatgcgtggaacaatcttgagaaacagcgggcttatctgtcgatgatggcgcaaaaacgcgtcgatggtctgctggtgatgtgttctgagtacccagagccgttgctggcgatgctggaagagtatcgccatatcccaatggtggtgatggactggggtgaagcaaaagctgacttcaccgatgcggtcattgataacgcgttcgaaggcggctacatggccgggcgttatctgattgaacgcggtcaccgcgaaatcggcgtcatccccggcccgctggaacgtaacaccggcgcaggccgccttgccggttttatgaaggcgatggaagaagcgatgatcaaggtgccggaaagctggattgttcagggtgactttgaacccgaatctggttatcgcgccatgcagcaaatactgtcgcagccgcatcgccctactgccgtcttctgtggtggcgatatcatggcaatgggcgcactttgtgctgctgatgaaatgggtctgcgcgtcccgcaggatgtttcgctgatcggttatgataacgtgcgcaacgcccgctattttacgccggcgctgaccacgatccaccagccaaaagattcgctgggtgaaacagcgttcaacatgctgttggatcgtatcgtcaacaaacgtgaagaaccgcagtccattgaagtgcatccgcgcttgattgaacgccgctccgtggctgacggcccgttccgcgactatcgtcgttaatcacccgttgcgggagtctcttccggctcccgcagccactccttattcagcgtctcactatcgccgagatactcaagcagccaggttaacgcaggcgacatatcattttgctgccatgtcagacaacatgccgaatccgggaaggggttttccaattcaagtgctacccacttcccctcattaagccacggtttggcgaaatgtgttggcaccatccctatgcataatcctgccgagatacaggttgccgatgattcccagtcaggcacgacaactcttttttggttatccagcaaccaggtaatacgtttaggtagcgttcgcgaggtgtcttcgcgcaccaacgacggccagttgcgcaacgtatcatcgctgaatgggccatccatcaacgccagcgggtggtggctggcaacaacgcaactccagcttagcatccccatatcccggaaggcataacgaccgcctaccggaatcgcgcgtgttgcgccaatcgccagttccacgcgcccgtcggaaagcgcatcccagacaccgttgaacacttcctgaaagacaagaagttcgacatcatcaaaatggcgataaaaatcaacgatcatctgccgtgtacgttctggcctgacaatattatccactgcgatagctaactgaccgcgccagccgttcgctatctgctgacattgctggcgggtgatctgcatttttttgacaacagagcgcccttctttgagaaaccacgctccagcagcggtcagctccacatcacggtgccgtcgttcaaagagcggcaccgccagccactcttccagctgacgcacggtatagctgaccgcagaaggaacgcgatgcagctcctgtgccgcagcgctaaaactaccattacgcgctaccgcatcaacaacttcgagtgaatattctgaccacatagtctgcctgcaaaatttttgaaaccagtcatcaaatattaccgtttcacaacactaatttcactccctacactttgcggcggtgtttaattgagagatttagagaatatacatgcaacctgggaaaagatttttagtctggctggcgggtttgagcgtactcggttttctggcaaccgatatgtatctgcctgctttcgccgccatacaggccgacctgcaaacgcctgcgtctgctgtcagtgccagccttagtctgttccttgccggttttgccgcagcccagcttctgtgggggccactctccgaccgttatggtcgtaaaccggtgttattaatcggcctgacaatttttgcgttaggtagtctggggatgctgtgggtagaaaacgccgctacgctgctggtattgcgttttgtacaggctgtgggtgtctgcgccgcggcggttatctggcaagcgttagtgacggattattatccttcacagaaagttaaccgaatttttgcgaccatcatgccgctggtgggtctatctccggccctggctcctctgttaggaagctggctgctggtccatttttcctggcaggcgattttcgccaccctgtttgccattaccgtggtgctgattctgcctattttctggctcaaacccacgacgaaggcccgtaacaatagtcaggatggtctgacctttaccgacctgctacgttctaaaacctatcgcggcaacgtgctgatatacgcggcctgttcagccagtttttttgcatggctgaccggttcaccgttcatccttagtgaaatgggctacagcccggcagttattggtttaagttatgtcccgcaaactatcgcgtttctgattggtggttatggctgtcgcgccgcgctgcagaaatggcaaggcaagcagttattaccgtggttgctggtgctgtttgcagtcagcgtcattgcgacctgggctgcaggcttcattagccatgtgtcgctggtcgaaatcctgatcccattctgtgtgatggcgattgccaatggcgcgatctacccgattgttgtcgcccaggcgctgcgtcccttcccacacgcaactggtcgcgccgcagcgttgcagaacactctacaactgggtctgtgcttcctcgcaagtctggtagtttcctggctgatcagtatcagcacgccattgctcaccaccaccagcgtgatgttatcaacagtagtgctggtcgctctgggttacatgatgcaacgttgtgaagaagttggctgccagaatcatggcaatgccgaagtcgctcatagcgaatcacactgatctatatcgatatacttatacttaggctgctaacaaaatttgttgtatgattgaaattagcggcctatactaatttcgagttgttaaagctacgataaatattatgtttttacggggacaggatcgttcccgactcactatggatggtcatttcggcaaaggttcctcctttccctctgttctacgtcggattatagactcgcggttttttctgcgagatttctcacaaagcccaaaaagcgtctacgctgttttaaggttctgatcaccgaccagtgatggagaaactatgagttcatcgtgtatagaagaagtcagtgtaccggatgacaactggtaccgtatcgccaacgaattacttagccgtgccggtatagccattaacggttctgccccggcggatattcgtgtgaaaaaccccgatttttttaaacgcgttctgcaagaaggctctttggggttaggcgaaagttatatggatggctggtgggaatgtgaccgactggatatgttttttagcaaagtcttacgcgcaggtctcgagaaccaactcccccatcatttcaaagacacgctgcgtattgccagcgctcgtctcttcaatctgcagagtaaaaaacgtgcctggatagtcggcaaggagcattacgatttgggtaatgacttgttcagccgcatgcttgatcccttcatgcaatattcctgcgcttactggaaagatgccgataatctggaatctgcccagcaggcgaagctcaaaatgatttgtgaaaaattgcagttaaaaccagggatgcgcgtactggatattggctgcggctggggcggactggcgcactacatggcatctaactatgacgtaagcgtggtcggcgtcaccatttctgccgaacagcaaaaaatggctcaggaacgctgtgaaggcctggatgtcaccattttgctgcaagattatcgtgacctgaacgaccagtttgatcgtattgtttctgtggggatgttcgagcacgtcggaccgaaaaattacgatacctattttgcggtggtggatcgtaatttgaaaccggaaggtatattcctgctccatactatcggttcgaaaaaaaccgatctgaatgttgatccctggattaataaatatatttttccgaacggttgcctgccctctgtacgccagattgctcagtccagcgaaccccactttgtgatggaagactggcataacttcggtgctgattacgatactacgttgatggcgtggtatgaacgattcctcgccgcatggccagaaattgcagataactacagtgaacgctttaaacgaatgtttacctattatctgaatgcttgtgcaggtgctttccgcgcccgtgatattcagctctggcaggtggtgttctcacgcggtgttgaaaacggccttcgagtcgctcgctaaaggctattctatcgccccctcttcgggggcgagttcagatcaggcttctgtacctggttgattcatggcattttctcgtgccgccagcacacgttctaccgtatctaccactgcctgagtttgtggatcaatttcaatgttgacgcgtgcgccgagttttttcttcccaagagtcgtgcgttccagtgtttccggaattaaatggacgcaaaaacgcgttggcgtgacttcgccgacggtcaggctaataccgtcgatgccaataaatcctttgtacaggatatatttcatcaactgactatcctggactttaaaccagatctggcgattattttccgaggttaatattttcgccacttcagcggtggtcataatatgacctgacattaagtgtccgccaatttcatcactgaatttcgccgcacgctcaacgtttacccaatcccccacttttaaatcgccaagattggtaatgcgtaacgtttctttcatcaggtcaaaactgacatggttgccgttaatttccgtcacggtcaggcagcaaccgttatgcgccacggacgcaccggtttccaggccgtccagcatgtggtcgggtaactccaccacatgcgtacgaaaatttggtttctcgtcaatcgacaccagttttgcggtgccctgtacaatccccgtaaacatacttacaactcctgaaatcagttaagacattctgttcagcacaatagcaggtggcaaacgcccttaccagtgaaggggtaagaatgactattttttcactggagaattaataaatcctcgctacaatagactgaatttcccctgcttcttctttttgctgcccattcaggcggctttttagtctctcatataactacaaataaaaggtgttcacgtgcagaagtatatcagtgaagcgcgtctgttattagcattagcaatcccggtgattctcgcgcaaatcgcccaaactgcgatgggttttgtcgataccgtgatggcgggcggctatagtgccaccgacatggcggcggtcgctatcggtacttctatctggcttccggcgatcctctttggtcacggactgctgctggcattaacgccggttatcgcgcaattaaatggttccggtcgacgtgagcgcattgcgcatcaggtgcgacaaggtttctggctggcaggttttgtttccgttctcattatgctggtgctgtggaatgcaggttacattatccgctccatggaaaacatcgatccggctctggcggacaaagccgtgggttatctgcgtgcgttgttgtggggcgcgccgggctatctgttcttccaggttgcccgtaaccagtgtgaaggtctggcaaaaaccaagccgggtatggtaatgggctttatcggcctgctggtgaacattccggtgaactatatctttatttatggtcatttcggtatgcctgagctcggtggcgttggttgtggcgtggctactgcggcggtgtactgggttatgttccttgccatggtttcttacattaaacgcgcccgctccatgcgcgatattcgtaacgaaaaaggcaccgcgaaacccgatcctgcggttatgaaacgactgattcaactcggtttgccgattgcgctggcactgttctttgaagtgacactgtttgctgtcgtggctctgttagtgtctccgctcggtattgttgatgtcgcaggacaccagattgccctgaactttagttcactaatgttcgtgcttcccatgtcgctggcggcagcggtaactatccgcgtaggttatcgtctgggtcagggctcaacgctggatgcgcaaaccgctgcgcggaccgggcttatggtgggtgtctgtatggcaaccctgacggccatattcacggtttcactgcgggagcaaatcgccctgttgtacaacgacaatcccgaggttgtaacgctggctgcgcatttgatgttgctggcggcggtatatcagatttctgactcaatccaggtgattggcagtgggattttgcgtggttataaagatacgcgttccattttctatatcacctttacggcttactgggtgctgggcttgccaagcggctatattctggcactgaccgatctggtcgttgaacctatggggccagcaggcttctggataggctttattattggcctgacgtcggcagccattatgatgatgctgcgtatgcggttcctgcaacgtctgccgtcagttatcattctgcaacgagcatcccgctaataaagacaaggcgcaaccttcacgggttgcgcctgtgtttttacgcaggctggagcgttgcgccaatcccgtcttcgtctggctgtaatttcagagcgttgcacagagtttgccgactggcatctgttatctcaacgtgtatatccccggtaacttcccctttcacattgatgaagtcaggtgagatttctttcgcactggtttgcaggcaaatcgctccctctccgcgcaggcgtttcactttcagttgcacatgcgttgccgcaccagtgatcagccacagttttccgccattcagattgatgttaccaacaataaaagtgacaccgtcaccttttaccgtactgccgtcgagaatcaacacaccgccctgctgtacagtaatcgttgattgttgcagatctgcgccatagccaataatcattgaagcgccgtccagtaatgcaacactcccggtcagttcaaccggtgcgcgatcttcctctacgacaaaattttcgtccgcgctggtgggtgacaacaggatcactgttccaccttgtattaccgcattttccagcgtaccggcatgcacttcagcccgaccacccacattcacggacaggttttgcgtcttaccggaactgtagagctgaaggccatccgtccccagacgataaatggatccattctcaacaatagtgtcagagtcttcaccaccgagattattcatggtgccaccagcaagcaacgtatcactggctttcccggccagcataaaaacgccgccctgattaatctcacaattgctggcttccccacctggatacaccaacaattcaccaccttcatctaccacgaccgctgaggttgtcccattaaccaacaggccgccctcttgatcgagaatgattttttccgcgcgatgtccttccagtacacgcaggttaccgccattttccagcaacaaaccgcaggcataaccctgatcaacgctgaattcaccttcgggatggcggccattaaccgtagcgagcgtagagagactaattgcgcctccctcggactgaacaatatctgtggcaatggcaccgtcgctgaccgatagcgtgccattgttaccgtactgtgtgcatttggcgatcccaccggttgccactttcaaccagccagcccccgtgaccacggtattttcggctcttccgccagcttcaacaatcaactcgccttcagtaagttgcgtcgcgccaatgacctcgccggtcttaacaatttgcacattcccgtcgctcatcaagtttttcgcatcagatcccatgatttattcctttgctgcatctgtgtgcctttattgctacctaagtgtaaaggctacggaggatttatccacgacagatttgagatggtggcaaacaactctgtttaaactctgatacacgaattattgggttgtatcagatgtaaatgcgatcctgaataaaaatcgcccttgcaaatcaacaaaatatagccaatttgcttaaaagctctgcaaacggtcgaaatagcgcagaaaattacgttttgcctcttgccaccttcccactctgccgctaatattcgtccccgttgtcacctacaacgttgcgttcatagctcagttggttagagcaccaccttgacatggtgggggtcgttggttcgagtccaattgaacgcaccatcctgcgtccgtagctcagttggttagagcaccaccttgacatggtgggggtcggtggttcgagtccactcggacgcaccagattttcttaatctggtcttctcctttttccctctgtttcttctctgtatccaatacgttaaaagatttacactgtcttcgtatgcgttatcagaaggagaatcgctatggcaactttgttacaacttcattttgcttttaatggcccatttggcgacgcaatggctgagcagcttaaaccgcttgctgagtcgattaatcaggaacctggttttctgtggaaggtatggacagaaagtgaaaagaaccacgaagccggtgggatctatctttttactgatgaaaaaagcgcccttgcctatctggaaaaacatactgcccgacttaaaaatctcggcgttgaggaagttgtcgccaaagttttcgatgtcaatgagccactgagtcaaatcaatcaggcaaaactcgcctgacagaatttaatcaagggcggttagcgcccttttcatccctgtctgaaatttctcaaattctaaaaatctcaaccaaacttatctgataacactaaattcgaaagaatgcgtacaggtaagtaacaatgaaaaaaattgctattgtgggtgccgggcctacggggatctacaccttattctcgcttctacagcaacaaactccactttctatttctatcttcgagcaggctgacgaggccggtgtcgggatgccatacagtgatgaggaaaactcaaaaatgatgctggcaaatattgccagtattgaaataccgccgattaattgtacgtatctcgaatggctacaaaagcaagaagccagccatctccagcgttatggcgttaaaaaagaaaccttgcacgatcgtcagtttttaccgcgaattctgctgggcgaatatttccgcgatcaatttttacgattagtagaccaggcacgacagcaaaaatttgcagtggctgtttatgaatcatgccaggttaccgatctgcaaattacaaatgctggcgtcatgctcgctacaaatcaggatttacccagcgagacgtttgatttagcggtgattgccacgggtcacgtctggcctgatgaagaagaagcaaccagaacgtattttcccagtccgtggtcaggcctgatggaagcaaaggtcgatgcgtgtaacgtgggtattatgggaacatccttgagcggactggatgcggcaatggcagtggctattcagcatggttcgttcattgaagatgataaacaacacgtcgtttttaaccgcgataacgcaagtgaaaagctaaatattacgttgatgtcgcgcacgggtattttacccgaagccgatttctattgccctattccctacgagcccttacacatcgtcaccgatcaggcattaaatgctgagattcaaaaaggtgaagagggccttttggatcgggtatttagattgatagtagaggaaatcaagtttgctgatccagactggagccaacgcatagccttagagagcctgaatgtcgattcctttgctcaagcctggtttgccgagcgcaaacaacgcgacccatttgactgggcagaaaaaaatctccaggaagtcgaacgcaataaacgagaaaaacatactgttccctggcgttatgtcattctgcgcctgcatgaagccgtacaggaaattgttcctcatctgaatgaacacgaccataaacggttcagtaaaggccttgccagggttttcatcgataattatgcggcaatcccttcagagtctattcgtcgcctacttgccttacgtgaagcgggaatcattcatattctcgccctcggtgaagactacaaaatggaaattaatgagtcgcgcaccgtcctgaaaacggaagacaacagctactcgtttgacgtttttattgatgcccgcggacagcgtccgcttaaagtgaaagatattcctttccctgggctacgcgagcaattacagaaaacaggggatgaaatccctgatgttggcgaagattatacgttacagcaacccgaagatattcgtggacgcgtagcgttcggcgcgttgccctggttgatgcacgaccagcctttcgttcagggacttacggcatgtgcagaaattggtgaggcgatggctcgggcggtcgtaaagcctgcatcccgtgctcgtcggcgtctttcgtttgattaaaggtaaagctatcagcactcaacaaactgatgctgttcattaagacgatagcggactccggttcgaatattgttttcaccttcaatggcgacggcgaagcgaactctttcgccgtcatgatatgccagtgcggcgcttccccctggcccgagaataattgagtcgaccacgcccgtgctcactaccgttgaattttcaccgctggcaatgatgtgtacattgtcgccgctgttggcaattctggcgtttgcgccaaagctggcgatttgcaccaggtcaccattactggcgacatgacaccgttcacccaatgtacaaacgcgtactcgcattccggtattcgcaatccgactactatctccagcgctgcttatccgcgaagaattaccggttacagcaacccgtgcgcgttcaccggagctgccaatgtgactgttaaagccgacacttccaatccgcacgctataacccatactggcaatttgcgcggcatacccagcggttgcgattcgggcgttatcctcacaacagccgatgcgagcatgatcgtcgctgcgggcaaactgactgcaaaatggtatctctccggggtctgtggccagtttttgcatagaggaaacttcctgatgcgcgaagttttcatccgccagccattttttccacgcatactcaaccagactctccgcccagtccgtatatccttcctcaatcagtgcatgatgaatatcggcataactaccgccgcgtgggaaatggcgcaggaaccagcgatacatcaccgctccgatacgccattctcgcaggtctgctcgtgtaatgatcattcgttagtgccggtgatagccatcgaccatgcttttaaaggtttcgtgtggcgtacgccccgtggtgcaaagataaagatgaccgaagataaaaaagaggcttataaatgccagagcaaaatgcgcctgcaataaccagtatcttacgccaggaaacacatctcccacggcttgcggatagagacacaacagccccgtcaatagtaacaacggcagcaatccatacatgacaccaacataggcgacctgctgtaagggattaaatttagactgtgttgttgccgggaaaggatgttcttccccctgcataatgccaaacaaataaaatcgcgtttgttttgccgctcgttccagccacccctgacgacgaatgcgatagtggtgaccattatccccaacggcattgatcagcacaaagccgagccagcatgccagtaacaaaaatccgcaaacttcatgcaccgcaaccagacttttaaccgcagttgcgcccaccagcgcaaagtgatttatcagcccacttgccagcaacaatacaaagagtaacgcattcgaccagtgccataatctgaccgctttgcagtaaagataaatcttctcaccataatcggtgactgatttcttcacgccacgagcacgaagcaaggcatgcagccccagcaccaaccacatcccaaccagcaatactccggcaatgatcaaccacaccggccaaaattcgggagtgaactgtggcacatagttcgctaactggctctgaaactgttcagcatgttgcgacgggttcatacattttcctttttaatcaaatgttgaccgaaccggcgatacagatgcggtttcccggcaccaggtagctgatattgatagtatttattatcctgcaaccacgcctgaatttctgggctatcttcgcgaccaaagatcaatgcgtgttccggacaggcgctgacgcaaatgggcggaaagccttttgccagtcgggactcagcgcagaaatcacatttatctgccactttagtgacagggttaaggtagcgaacctggtacggacaagcgccaatgcaataactgcagccgatgcactgcgatttttctacccgcacgatcccctgctcatcacgccacgacgcccctgtcgggcatacgtcgatgcacggagcatcttcgcagtgctgacatgactggcgaaaaaagtgatactgcgtttcgttgtcgttatcggtgactggaatgtgtgctatcgataaacggcttccctgagcggggacgtggttagttttacggcatgcgcgggcgcaaatattacagccattgcaccgtgactcgtcatgaatcatggcataccgaacttccttttcttgcctcgtgttcgctaacagagaagacgcagaaccagtaaaaaagattactgttcccatccccagaacaaatttgcgtcgagtgaaggacatctgattatcccctaatgcagtggctgcaactgtccaccctatccatgacatctccctgaaatttcaggggttctgaaactgctctacctcgaaccattcgcataagccataagccttgccataggtcataaatcgctcgctaaacaagtacaacaccgccgtcgatgactccacctgccgtatatcggcatattcaggtgcaacatccatcgcggcgatcgcggcttcaatctgcgcttcctggaagtaatatggcgcttgcatcagcatggcgactttgtaaggacgaggatatgtctggcactcaaaacgaacggcgtgtgcaatggcgcgacaaatgtcctgctccacaacttgcaaagacatcgccgcgtagttttcactcatggcctgcgttgagtaatagtaatcatcctggcttcccgtcatacaagcgatatccgcgtagtctccgttctgcttaatgctttccagcaaaactgacagctcctcttctgcaaccgaatagggtggcgagagaaacacggcgcgcgccaccagctgcccagccacagaatgctggcgaatgaactctgccaggatttcagccggttctggttcggttaccgtatcaacggggtgacgcatcccctgtaaccattgccgcttcgcctcgtcaacttcgctgactttcgctaacggcaattcatcccgatggttcatctcacccattccttacacaggcagtagattgtgtgctgccagatcggcggcaatatcttccagccccagacgctgcaatgtttcgcgggtcggacaaccaagctgtgggtcccagcccatttctttgtagaacatcgtgagcgaagcatgcatatcgtcacgatccattttgtcagtaccttcagtaaagaccgggatctgcggatccttgtcgaatacccaggaacagataagatcgtgttcattacgcatatctttggtttgcatcagttttaccgtgtaggcacgatgcaacgtaaagatacgctctgcagctaaatctaatttttcctgagtcatctcttcgccggtgatcgctttgaagaatttggcttcaagcgccagatcgccccggtaattacggcttttcagcggcgaaacggtcattggccagacccagttacacagggtgacggcgttatgcaaacagacccgcaacagcgaccacttagcatatttaatttttgcgtcattgattggcgtgtagtttttggtttcatcgtaggcatcttcagaaccaaaaagctctttcgccacttcacgttgcagtttcaatggcaagccggaaccaataaagttgatatgggtatgtgtcatgcagtcacggttgaacatacagttaacaatggaaccgacctgcgctgacgcttcattggcatggtgaaccggatagccaaacggcgaccagagtttattttttgcgtagccccagtactcttcacccaaattccagcgttctgcgatggcatatgaaccatcagccaggtgactcagctcacccacacgatgcgccagacggtagtaaaaatctttaatgaaattaacgtcacccgcttccagttgatcccagtgaatttccgcatactcttcagctggcagaacacgcttgaacacccctttgctgtaacaataagtaaagtcgcgatgcagctgcccgtagttacaccataggccgtagtcatcgaacaaattcagaccaaccaggttaccaatcacacgaccatcgtctttatcttcaaaatctttcggcccgttcgggaagatggtggtatggacaaagttggctacacaagtgttaccacctgtgctgggcacgccaaactctttcacccgaggaatattcatttgggtcatacaacggatcgggcaagagtggcagccactcatttttactgtgtatttctctgccgccggacctaagtcaaaaacggatttataggtacgaaagccgaccgtgttctgattgcctggcggaatttcccccgtttcaatcggaccaccttcagccgcgccccaaaacagccctttacgtgctgtccaacgtgacttgggatctgaatactctgcccacgattgcggcgtacttggcacgacatggttgttattcgcaccaataagttcagtcatcatgtaatcgttgagacgcttcatctcctgacgatcggcaatgttgacccctttcgtcccttcaaccgcaatcgctttcaggtttttcgaacccataattgcgccagttcccgcaccgccgctgtggttacggctattcaacatgccagagagaggaacaaggttttccccagcctgaccaatagccgccacacaggtttccggactggtcaatcgacaaatttcttccgtcgttgcgcgcgtcccttttccccataagaaatcggctttttccaggctaactttgtcatctttaatcttcagccataccggtgatttcgccttcccttcgataataatgacgtcgtatccagcgaatttcatttgcgctgcaaaaaagccacccatatgggcatcgacaactaaatttcctttggtaaaagtagaaagtgaggtgatatttacgcgagaactacagggggcaccagatccagttaatgggccggtagcaaagactaatttattcgcttcatcgaaaggtttcgtgcctggcggtacttcgtcatacataattttgtagccgaagcccatgccaccgacaaaacttttaaacttactggaatcttcgagggtaatatttcctgtcgtgagattgactcttaatatattacctgtccaaccgttagccatgattttttcctttgcaagattcacacagtaatatctttccactcgataatttttaacgcccctgttgggcaggcgtttgcgcattcaccgcataacacacatttcgaggattttttactttcggtatttacggtggccatcatccacgggcatgccgtagtacaggcgctacagccaatacagcgtttatgatcgacggtaatacagccttctttctgctgccaggtaatcgcaccaatcgggcagacgttcatgcattgcggctctttgcattgacggcaggtgtccgcggtatagttgagatcgccatacaggccgccgccagagccaaccccgttgtcgccaaagaaataattgcggtggattttgatacgggagaagaatgtccctactgagccatcgttgaagttggtacaagagatttcacagcggtggcaacccgtgcatcgcgctcgctgggtcaccagcacccctttgggtgtatttatcaaccctactgtgccgctatcaatatcttcctgtttgcaacccaaaagtgacagtaacgcaggggcaattgttagaccagcaaggccttttcctgatatacgcaagaattctaatcgcgttaagccaatatctaatagtggacgatcaaccgggttcatttatttcgcatcctcttcgcaaacacagtgctgacaattcagcagcctgatattaagcattcaactaatacgctgctgactctgtccccaacaccagatattttccctaacccgatagtgtatgagaaaagatttaacgccgataaactaatcctttatggttaggagaaaaaataatgtgattattctgagcccttaacattgatcgttatcaattaaaattacaaagcaagaaattataagtgaactgatatttattatcatttgaaataaatttaacttaagcgacaattatttgtgacgttcattgcagaaaataaaaataatattatcgttataaattaaaatacataccgcgattcgtataatttcagcagttgttatttagaatgattaactggaccgcaactgaagcaagaatatcaggatgaagcttaccgcctcatcctgaatggtcattttaccagtgcgttaatgacggtttccatcgcctgcttttccagctcactgcgctgaatgcgtttattggctaatgctgtacgtaatacgcctgcgataacaatatgctttggttcctgccccagatcgcgcatttccagcacaactttaccgacaactctgcacatttctcggtacagttcatcctcttttgtccgatttcccattctttatacctatttatcatgccaactatcagcatatatcaatctaaccaattaaacaaaaatcaaacaaaatcagacaaataacgcgataaattattttaactgtagcaattgagcgatgatgtatttatacaccggatgaactttcacttatcctcacactgacaacttcggcaccagacgttgcgcaaacagtgaagtttttgcgtaaccttttccctggaacgttaaatctttgataacaatttattgtctaacaagttgtatattttttgaaacgctgtttttgttttccttttggattaatttcagcgtataatgcgcgccaattgactcttgaatggtttcagcactttggactgtagaactcaacgattcaaaaacaggcactcacgttgggctgagacacaagcacacattcctctgcacgctttttcgatgtcacctatccttagagcgaggcaccaccacttgcgtaataccggattcgctttccggcagtgcgcccagaaagcaagtttctcccatccttctcaacttaaagactaagactgtcatgaaaaagaccaaaattgtttgcaccatcggaccgaaaaccgaatctgaagagatgttagctaaaatgctggacgctggcatgaacgttatgcgtctgaacttctctcatggtgactatgcagaacacggtcagcgcattcagaatctgcgcaacgtgatgagcaaaactggtaaaaccgccgctatcctgcttgataccaaaggtccggaaatccgcaccatgaaactggaaggcggtaacgacgtttctctgaaagctggtcagacctttactttcaccactgataaatctgttatcggcaacagcgaaatggttgcggtaacgtatgaaggtttcactactgacctgtcagttggcaacaccgtactggttgacgatggtctgatcggtatggaagttaccgccattgaaggtaacaaagttatctgtaaagtgctgaacaacggtgacctgggcgaaaacaaaggtgtgaacctgcctggcgtttccattgctctgccagcactggctgaaaaagacaaacaggacctgatctttggttgcgaacaaggcgtagactttgttgctgcttcctttattcgtaagcgttctgacgttatcgaaatccgtgagcacctgaaagcgcacggcggcgaaaacatccacatcatctccaaaatcgaaaaccaggaaggcctcaacaacttcgacgaaatcctcgaagcctctgacggcatcatggttgcgcgtggcgacctgggtgtagaaatcccggtagaagaagttatcttcgcccagaagatgatgatcgaaaaatgtatccgtgcacgtaaagtcgttatcactgcgacccagatgctggattccatgatcaaaaacccacgcccgactcgcgcagaagccggtgacgttgcaaacgccatcctcgacggtactgatgcagtgatgctgtctggtgaatccgcaaaaggtaaatacccgctggaagcggtttctatcatggcgaccatttgcgaacgtaccgaccgcgtgatgaacagccgtctcgagttcaacaatgacaaccgtaaactgcgcattaccgaagcggtatgccgtggtgccgttgaaactgctgaaaaactggatgctccgctgatcgtggttgctactcagggcggtaaatctgctcgcgcagtacgtaaatacttcccggatgccaccatcctggcactgaccaccaacgaaaaaacggctcatcagttggtactgagcaaaggcgttgtgccgcagctggttaaagagatcacttctactgatgatttctaccgtctgggtaaagaactggctctgcagagcggtctggcacacaaaggtgacgttgtagttatggtttctggtgcactggtaccgagcggcactactaacaccgcatctgttcacgtcctgtaatattgcttttgtgaattaatttgtatatcgaagcgccctgatgggcgctttttttatttaatcgataaccagaagcaataaaaaatcaaatcggatttcactatataatctcactttatctaagatgaatccgatggaagcatcctgttttctctcaatttttttatctaaaacccagcgttcgatgcttctttgagcgaacgatcaaaaataagtgccttcccatcaaaaaaatattctcaacataaaaaactttgtgtaatacttgtaacgctacatggagattaactcaatctagagggtattaataatgaaagctactaaactggtactgggcgcggtaatcctgggttctactctgctggcaggttgctccagcaacgctaaaatcgatcagctgtcttctgacgttcagactctgaacgctaaagttgaccagctgagcaacgacgtgaacgcaatgcgttccgacgttcaggctgctaaagatgacgcagctcgtgctaaccagcgtctggacaacatggctactaaataccgcaagtaatagtacctgtgaagtgaaaaatggcgcacattgtgcgccattttttttgtctgccgtttaccgctactgcgtcgcgcgtaacatattcccttgctctagttcaccattctgcgctgactctactgaaggcgcattgctggctgcgggagttgctccactgctcaccgaaaccggataccctgcccgacgatacaacgctttatcgactaacttctgatctacagccttattgtctttaaattgcgtaaagcctgctggcagtgtgtatggcattgtctgaacgttttgctgttcttctgctgatagtggtcgatgtacttcaacataacgcatcccgttaggttccacggaatatttcaccggttcgttgatcactttcaccggcgttcccgtccgcacgctggagaacaaggctttaatatccggtgcattcatgcgaatacaccctgaactgacgcgcaaaccgacgctgtccggcgcactggtaccatgaatgaggtattcgccattaccatgcgcgaggcgcagtgcgtaacgtcctagcgggttatttggtccggcaggaacgactggcggtaatttaatgccacgctccagcgaacgttgacgaatgcctgccgtaggcgtccaggttgggttagggattttctgcccaacacgcgtttccatcaccggcgtttccagcccctgcaatccaatacctattggataaacctgcacaatattttctcccggcggataataataaaggcgcagctctgcaaggttaacgataatcccctgacgcggtgcatcaggtaataacagttgtgaaggaatagttatcgtcgtaccaggttttggcaccggggcgatagtgttattggcttcaaggatcaacattgccgcagtatcaaaacgtcgggcaatagcctgaaggtttttatccccttcttgcaccgtatacgtttgattttgcccaaccagtcggcttccggttggtggtagcggataatcaaccgcccaggcagcctggatggcgctaaaagcgccgataagcgtgagtgtaagcaaagacgcgcgtttcattgtaaacctcctgtatttgccggagactcacgctgaaacgtcggatggcgcttatgttcacctgaaaccgaaacactcctgtgcaggtcagtgtaaacattgaccatccggcaatgtgagccaaccggatgaaagctgtccctttagtttagctaagtgcagcggctttggcgcgaattgcgcgaatcatcgcttccagaccttgtgaacgagatggggtgagatgttgggtgagcgccattttttcaaaccacggacgcacatcgaaattgacaatatcctgcggcgtcatctgatcgtagagtataaagacgaccgcaataagccctttcacaatcgccgcatcgctgtcgccctgcaattcaataattccctgcgcattctggcgcatgacaatccacacctgactctggcagccctgaatgctattttgtgggcttcggtcttcgtcgcgtaattctggcagacgctggcccagctcaataatgtagagatatttctcttcccagttggcgcagcgtaaaaaattacgcagcaatttttctttatccggcaataaagccatagtgcctccctgttatcccagcaaacggtgaatacgttgcaggccggtcaccagacgatccacttcttcatgggtgttatacatggccagcgacgcccgacacatcgcagggacgttgtaataggccattaatggcatagcgcagtgatgtccggtacgcacagcaatgccgtaattatcgagaaaactgccaacatcataggcgtggtgtttaccgagattaaaagcaataacgccaagcctgttttgtgggccatagagagtgagatccggtacagattccagctgtgatagcgcgtaatgcatcagattctgttcatactcggctatgttattaagccccagcgccgaaacatactccagcgccgcgccaagaccaatgatgcccccggtattgggtgtaccggcttcaaaccgccatggtgctttggtccaggtagtgccttcactcaggctgacggtggcgatcatagaaccgcccccttcccacggcggcatctcctgcaacaaggcttctttcacataaagaatgccaattccggtggggccatacagtttatgcccggagaacacgtaaaagtcgcaatccagcgcctgaacatccaccggatgatgcatcaccgcctgagcaccatccaccagcacttttgcgccatgctggtgcgcaagcgtgatcatttccgccagtggattttctgtgccaagcacgttggagacatgagtaattgccagcaggcgagttttctcatcaaacagcgtaggcagcgtctccagttgcaacgtaccgtcgggattgagcgggatcacacgcagctctgcgccaacgcgtgcgcaaagcatctgccagggaacaatgttagcgtggtgctccatctgactgatgatgatgttatcgcccgcccgcacgttgctgttgccccagctattggcgaccagattgatcccttccgtcgtgccgcggacgaacaccagctcttccgccgaacgggcattaataaacagcgatgcccgtttgcgcacgttctccattttctcggtcgcctgggcgcttaaggtatgaataccacgatgcaccgccgcgtagccgtgacgataaaactcagcctcggcgtcaatcacctggcttggtttctgcgcactggcggcgctgtcgagataagccagcggcaaaccgtttacctcacgcgaaagcaccggaaagtcggcccgcactttgtcgacggaaaaagtcatcttgcacctcctggcagccgttgaccgattcgggccagcacctgctgtttaagcccctcatcacgcagtgcttccgtcagttcggcagcaaaggcgtaaatgatcatctgctgggcatcctgctgattgatcccgcgcgagcgcagatagaacatctgttcatcatcaatacgccccaccgtcgcgccgtggctgcatttcacatcatctgcatagatttccagctgcggtttcgtatccacttccgccagtttgcccatcagcagattattgttggtcatctgaccatccgttttgatggcgtgctgcgcgacgttgatcaaaccgttaaataccgcgcggcctttgtcgctgacgatagttttgtgcaactgtcggctgttacaaaaacctttattgtgttccagccaggtacgggtatcacacacctcgtttttcaccggcatcgccaggctattgatccgcagcgtgctgttttcgccattgagttgcgtactggtgttgtgtcgtaacactgcgccacccagcaggaaactatggctaaatgcggtggcatcgtcagccagcaacaaatcgttatgggcaaagtggtgactgaccgggttttcaaacgccagcttgatatgctgcaagtgggcgttcgctgcgacattgatagtgaaccgtgcgccggtgaagtgacgagcatcattaaggctgacaaaatgttcgatcaccgttgcttcggcaccttccgccagatccagatgatgtcggtaatgggcagtgttgacctcttcacctgccacgccctgggtaatatgcattaacagcaatggctttgccggccgttgaccgcgcttcacggcgatatgcgtcacgctttgtgccaggctttccgtcaaatgcagaaacacttccgcctgaatagcgtcgggtaccccctgacggtcgtcgttaatgctcacttcatacccgctgccttcagtcgcatcgctcagtgctgacacgtaacgtccatcgacaaataccagccgcacagcgtctaacgttaacgctaaggcatctcgctgctgtggggatatctctcccgcaatgctgacaaactggctattggtcagcccttccagcggcgtatatttccagttttcatgtttacgtgtcggcagtccggtacgcagcaattgttgtaaatgctgctgtgcttgcggtgagcgttttgtcccttcagcttcaaacaagtgatgccactgttgcagcgcgttactgctgttcggtaagccagccataaccctgctcctccagttgtttgaccaacgtgaaatcgccggatttcacaattcgtccctgatatagcacatggacgtaatcaggcttgatgtagtcgagaatgcgttggtagtgcgtaacaatgatgaatgagcgcttgccatcacgcagcgagttcacgccatcggcgaccacttttaatgcgtcaatatccagcccggagtccgactcatcaagaatgcataactccggttccagcaccgccatttgcaaaatatcgttgcgctttttctcgccgccggaaaaaccaacgtttaccgaacgggttaataaatcttccggcatcttcaggagagcgattttctcttccatcaaatcctgaaaatcaaagcggtcgagcgtttcctggccgcgatagctgcgcactgcattaagtgccgtttgcaggaaaaactggttactgacgcctggaatctccaccggatactggaaggccataaagatgccttcgcctgcacgatcttccggcgacagtgcaagcaaatctttgcctttgaactcaaccgtgccgcccgtcacttcataatcttcgcgcccggcaagcgttgccgataaggtacttttgcccgaaccgtttggccccataatggcgtgaacttcgccgggacgaacggcgaggcttaatccacgcaggatagctttatcttccacgctgacgtgtaaatctttaatacttaacatgtttattccttatccgacgctgtgttcaagactgatggcgaggagtttttgtgcttcaacggcaaattccagcggcagttctgagaacacgtctttgcagaaaccgttaacaatcatcgagatggcgtcttcttcgctgatcccgcgttgcaggcagtaaaacagttgatcttcaccaatacgtgatgtcgttgcctcgtgctccagttgtgcgctgttattgcgacattcgacatacgggaaggtatgcgccccacaattagcgccaatcagcattgagtcgcactgagtgaaattgcgcgcattggttgccgtcggcatgattttcactaagccgcgataactgttctgactatgtccggcagagatccctttcgagataatggtcgatttggtgtttttaccgatgtggatcatcttggtgccggtatccgcttgctgatgaccgctggtcagcgccactgagtaaaactcaccaatggagttatcgccgcgcaaaatgcagctgggatatttccacgtaatcgcggacccggtttctgattgcgtccatgacattttgctgttttcgccttcgcacaaagcacgcttggtgacgaagttgagaataccgccggtgttgttatcgccagggaaccagttttgtaccgtggaatatttcacctcggcgtttttatggatgatgacttccaccactgccgcgtgtaactgatagctgtcacgcaccggagcggaacagccttcaatgtagctgacgtagctgtcttcgtcggccaccagaatggtgcgctcaaactgcccggttttttccgcgttaatgcgaaaataggtggaaagttccatcgggcagcgcacgcctttaggcacataaataaacgtaccgtcagaggctaccgccgcattaagcgcggcaaagaagttgtcattccccggcaccacggtgccgagatatttacgcaccagttccgggtgatcgtggatcgcctcaccaaaggaacagaaaataattccctgctccgccagtttttcgcgataagtagtggcaaccgaaactgagtcgaaaatggcatccaccgccacctctttgccttcccgcacgggaacgcccaactgctcaaacgccgcctccacctctttacttaaaaaggcgttcgcgccagtttgctgcaccgcgccaggttcagacgcgcaagtgtcgtcacaattaccgcacgatggtgctgagtagtagctgtaatcctgataattcagcttgtcgtagtgcgctttcaaccagtgcggttcttccatctccagccatgcgcgataggcgtttagacgaaacttcagcatccactccggctcattacgcttcgccgaaattgcgcgcaccacctcttcgtttatcccctttgccagctcatcggtggctaactgggtgaagaatccttctttataattcagcgggccgccggtccaggttttgacatcgtcagttgcttcagtattacgagacatagtaccgcctataccccaaagctttcgccacagccacattcattctgggctttagggttgtgaaatttgaatatctgattaagtccttcacgaacgaaatcgacttccgtgccatcaataaacggcatcgcttgcagcgggacaaacagcttcgcgccgtcgtgttcaaacagcagatcgtctttgtccggctcgctaacactgtcgagcacatagccaaagcccgcgcagcccgtttgcttcacgcctaagcgcacgccgaccatacccggctgctttgccaccagctcacggatgtgtatcgccgctgcgggtgtcagcgttaagccttgccaggcgaaatcctgtgggttaaaggttcctgaatgcatgtccatctatttacctcacttcatcgctttcagcgtataacagcatgttagtgataatgattatcagttcaacccagcaaacgcaggggctttaccgtaaaacatgctttttgcctgcttttaataagcatagaccctgatgtgtgggttaacaggcacgctaagaattaggtatctcattgttagataatggttattatctaaggagcattaaggctgtgatgaaaaagaaaaagttgtattgaaaatgactatttaagagataggtaaaaaagtgcagcgttcagaaataagaaaacccttaagtcagtgcgacacaggcttaagggttttctaccccatccggcgcttatctytggcagtctcagtggcttagctcttgaaggggcgataagaataatctcataaagctaacccgccgttttaacacaaactgcgattagtattatttttgaacaatatcaggcgggtagataagcagtattaagaaggtcatcgaacctggacggaggttaatccaggtcgatttggcgaacttgcggtattaagtcaggatcaatgcacgcccagacgccaggcaaagtagatttcttcttttaattcagcagaagagagagtaagcaggtcagcaaattcaagttctagttgtttcagacgtttgagatattgggcaggtgaaagattgctctggtcacggcgtaaaaattcaatggccagctgggtgggatcaagttgagtagacatagcatcctcgcttttagacaagacctgcacagtataccaccgtttactgtgcagataatgaccaaaagcaatatgcgtcacacttttctggtgacaacgtcacaaaatggcggtcgtcaatcgtgacgaacagcacaaacgccctttctcatcgaagatttcaatctgccagacctggtgacgcgaaccgagatgcaacggtttgcataccccgcgcacccgcccttctcgtgccgagcggacgtggttagcattgatttccagaccaaccactttttgctcaccttcggtacataaataaccggcaacggaaccgatactttcggccagtaccacggatgctcctccatgcagcaacccgaaaggctgctttgtccgcgagtctactggcattgtcgcttcaagggtgtcatcaccaatatgttcaaagcgaatatccaggaaccccaccatgtttccttcacccatagcattcagtgcttccagggtgattttccgtttccatatcatttaataatctccagtaaagcctgcacaggatggcgtacccccgtgccttcaacccgttttacctggctacggcaggaatatccggtcgccagacagcggttacgcggcagtcgctgcatagcctgatgccaggataactcatagatcccgagcgaatttttatggtttttcgcttcatgtccgtaagtccctgccatgccgcagcaacccacgctgacattttccagtttcgcgccaaaacgggcaaatatcgcggcccattgtgctggcgcacccggcaaggcggtaacttcggtacagtgaccaaagaaataccatgattcaccgctgactgtagccactggctgtgactcaagtgcgcttgccagccattcattcgccagtaagacgttaaactcgccacgttcctcgcccagcgccagtttatattcatcgcgataacaaagtaccagcgccggatcgacgcccaccattggcatacccagcttcgccatacggttgaggaaatccgccgtctttttcgccgtcttcgcaaaacgattaagaaaacctttaatatgctgggctttgccatttggcgaaaatggcagtaacacaggctggaaacctaatttttcgaccagacggacaaaatccgccaccacttgcgcatcgtaatagctggtaaaggggtcctgcaccaccaacactgtgcgcgctttctgctctgcattgagagattcaagctgttccagcgtcatgtttgccgagcgatgccccaccatttgttgttgtagcgaggggaccgacagcagcggcaaatcaaccatgccgatatgtttttccgagagtttgcgcaccagcggctggttaatgaagaagttaaaggttttcggcgcgcgtgccatcagcggcgcgtagctctcgaccgtagcgacgaggtggtcgcgcagcgggcgtaaataacgggtgtgatagagctgcagaaaacgagagcgaaactccggcacatcaattttgatggggcactgggtcgaacacgctttacaggccagacagcccgacatcgcctctttgacttcgtgtgagaagtcatattcgcctttattcgcatgccagctattgcgcgtgcgggcaattaacgtccgcaaactgacgccggattcaggcagttcttgttccagtttgagtggatcaacgccgcgatccgccaacaaacgcagccattcacgcaccagcgttgcgcgccctttcggtgaatgaatccggttctgggtgatcttcatcgacggacacatcggactacgggcatcaaagttgaagcataaaccgttgccgttacactccatcgcaccgcgccactgctggcgtaccgcaatggggatctgccgatcgaatgtaccgcgcttcaccgcgtccactttcatcatcggcgcatcgagaccttctggcgggcaaatcttccctgggttgagtcggttatgcgggtcaaatgccgctttcactttgcgcagttctgcaaaaagttcctcaccgaaaaacgccgggctgtattcagcgcgaaaacctttgccgtgctcgccccacaacaaaccaccgtatttcgcagtcagcgccactacgtcatcagagatttgcttcatcaaaatctcttgttgaggatcgcacatatccagcgctggacggacgtgcaagacacctgcgtcgacgtgaccgaacataccgtagcttaagccgtggctgtcgagcagcgcgcgaaattcagcaatataatcggccagatgttccggcggtacgcaggtatcctcagcaaacggaattggcttagcggcacctttggcattgccaagcagaccaacggcttttttacgcatcgcatagatacgttcaacacccgccagctcgcggcacacctgccagccaatcacacctgcctgttggctggcaatcagctcatcaagccgcacacagagagcattaactcgctcgtcaatcagcgcctcatcatcaccagcaaactccacaatgttcagcccgagcatctctttgtcaggcacatcggtaatcaactcgctgacggaatgccagacaatatcttcccgcgccagattcagcacttttgagtccaccgtctctaccgaaagcgcccgcgcctcaaccataaacggcgcgttacgcagcgcggagtcaaaagagtcatatttgacgttcaccagacggcgcactttaggcaagggcgtaatatccagccgcgcttcggtaataaaggccagcgtcccttctgaacccgtcagaatgcgcgtcaggtcgaactcggtcatctcatcgttaaagacatgacgcagatcgtaaccggtaagaaagcggttaagtttggggaagttgtcgataattaactggcgttgctgacggcaacgttgataaaccgtgttataaattcgcccgattgtggtattggatttacccagcgtttccgccaattcgacgggtaaaggttgcgtatcgagaatatcgccccccaacaacaccgcgcgtacgccaagtacgtgatctgacgttttgccatagaccagcgatccctgaccggatgcatcggtattgatcatcccaccgagcgttgcccggttgctggtcgaaagttccggcgcaaaaaagtagccgaacggtttcaggtactgattgagttgatcttttatcaccccggcctcaacgcgcacccagccctcttcagggttaatttcgatgatgcggttcatatggcgggacatatcaacaataatcccctggttgagcgcctgaccgttagtgccggtgccgccgccgcggggggtaaagatcagcgatgaatagcgttcctgcgcggcaagacgggcgatcagcgccacatctgcggttgaacgcggaaataccaccgcatcggggagaagttggtaaatactgttgtcggtcgacattgtcagacgatcggcataacttgtcgccgtatcgccggtaaaaccttgttgctccagctcttgcaaaaaattaagcaccagttgaacgacgccgggtgcctgggaaatctgtggaatcattatattgaccctttcctgcggtctgtgatgtaggtcgatacactattctttcaggcggctgcaatagcgcactgaaaggtgatgtttatttactctatggatttcgagttgcaggaaggcggcaagcgagtgaactccaggagcttacaatagtaagtgactggggtgaacgaacgtagccgcagcacatgcaacttgaaatacgacgagtaaatcgtttgcgtgttgcctgagttgttgtaccacatttttttctaacacgcccatcagaattaagggcagaatcggcctgttaaaaaccgctgaaattgctcatcattatgcaggtgagtttcgcgtgttcacgtcgcgtcgacgatttgacgcacaaaaaaggtgaaaagtagttatggtaaatgttcgtcagcccagggatgtcgcacaaattctgctttcggtgctgtttttagccatcatgattgtggcatgtctgtggattgttcaaccctttattctcggctttgcatgggccggtacggtggttatcgccacctggccggtattgttacgtttgcaaaagatcatgtttggccgccgctctctcgccgttctggtgatgacgctgttattagtgatggtgtttatcatccctattgctttgctggttaacagtatcgtcgacggcagcggcccgctaattaaagccatttccagcggcgacatgacgttacccgatctggcgtggcttaataccattccggtgattggcgcgaagctgtatgcaggctggcacaacttgctggatatgggggggacggcgatcatggcgaaagtccgcccttatattggcaccaccaccacctggttcgttgggcaggcggcgcatatcgggcgctttatggtgcattgtgcgctgatgcttctcttcagtgccctgctgtactggcgcggtgaacaggtggcacaaggcattcgccattttgcaacccgtctggcaggcgttcgcggagatgccgccgtactgctggcggcacaggctatccgcgcggtggcgctgggtgtggtggtgacggcgttagtacaggcagtgcttggcggtatcggcctcgccgtatccggcgtaccttatgcaacgttgctaacggtgttaatgatcctctcctgccttgtccagcttggcccgttgccggtactgattccggcgattatctggctctactggactggcgataccacctggggaacggtattgttagtgtggagcggtgtggttggcacgctggataacgtcatccgcccaatgttaattcgcatgggtgccgatttaccgctgatcctgatcctctctggtgttattggtggtttgattgctttcgggatgatcggtctgtttattggtccggttctgttagccgtttcctggcgtctgtttgccgcgtgggtggaagaagtcccgccgccgacggaccaaccggaagaaattctcgaagaacttggcgaaatcgagaaaccgaataagtaatttctcatcaggcggctctgccgcctgattgttaacccccgctaattgatatttgcttactcttccccatattttcctgcttaccgccattcagctggtagtacctgtcgcaaattctttacagtttttaaactaatgagacgaatctgatcgacgcaaaaagtccgtatgcctactattagcttacggttataaatcaacatattgatttataagcatggaaatcccctgagtgaaacaacgaattgctgtgtgtagtctttgcccatctcccacgatgggcttttttttaacatttttccgcttcgctacctcgcccctcactctttccaataatgttgcacaagatactgtgactctcttcaagccgtcagcaggctgataatgttatttatattttattgtttatttcatgcagccattacacgatgaacgcttatgaactccaggcactccgccatatttttgccatgactattgatgaatgcgcgacctggattgcccagaccggtgacagtgaaagctggcgtcaatgggaaaatggcaagtgtgccattcctgatcgtgtagtcgagcaactgttggctatgcgtcagcaaagaaaaaaacatcttcatgccatcatagagaaaataaataaccgcatcggcaacaacaccatgcgttttttccccgacttaaccgcatttcaacgagtctaccctgatggcaattttattgactggaagatctatcaatcggtagccgctgaattatatgcacacgatctggagcggctttgctaatttttccacagaaaggaattgtcgttgttacaacaataatgaatggatactgacacaacatcgctacactttttaaagcacctttgctaagtagaacctatgaaaaatccctattaccctaccgcacttgggttgtattttaattacctggtgcatggtatgggcgtcattttgatgagcctgaatatggcctcgctggagacactttggcagactaatgccgcgggtgtctcgatagttatctcatcgctgggcattggtcgattaagtgtcttgctttttgcaggattattatccgatcgctttggtcgccgcccttttatcatgctcgggatgtgttgctatatggccttcttttttggcatcctgcagaccaataacatcattatcgcttatgtttttggctttctggcgggaatggcaaacagttttctcgatgcaggcacttatcccagtttgatggaagcttttccacgctcacctgggacagccaatattttaattaaagcatttgtttccagcggacaatttttattaccgctaatcattagcctgttagtgtgggctgaactgtggttcggttggtcctttatgattgctgcaggcattatgcttattaacgctctgtttttataccgttgtacgttcccaccccatccgggtcgtcgcttacctgtcataaagaaaaccacccgctctacggaacatcgctgttcaattatcgatttagccagttataccttatatggctatatctcaatggcaacgttttatctggttagccagtggctgtcacagtacggacaatttgttgcaggcatgtcatacactatgtcgatcaaactactcagtatctacaccgtgggttcgctgctttgtgtatttattaccgctccactcattcgaaataccgttcgcccaacaacattactgatgctgtacacctttatctcatttattgctctgtttaccgtctgcctgcatcccacattttatgtggtgataatatttgcttttgtcattggttttacctctgctggaggtgttgtgcaaattggcctgacgttaatggctgaacgtttcccctacgctaaaggtaaagctacagggatctattacagtgcgggcagtattgcgacctttactattccgttgattacggctcatctgtcccaaagaagtattgccgatattatgtggttcgataccgccatcgctgccatcggctttttactggcactgtttatcggcttacgcagccgcaaaaaaacgcggcatcactcgctaaaggaaaatgtcgctccgggtgggtaatgcaatattcttttcaggtcatgcaagatcttacggataaataactctttctgcgctaactaaggaaaatcgcgatcaaaaacaaactatgacatgcaatattcctggaaacataaactttatgccatgtacccagggaaaatcatcttcagtatagtaattatgtaaaccgtcgaagaacaatacgtacggtaacgaaattatctttcagcaaggagctgtgaaaatgtctcaaaataaggctttcagcacgccatttatcctggctgttctttgtatttacttcagctacttcctgcacggcattagtgttattacgcttgcccaaaacatgtcatctctggcggaaaagttttccactgacaacgcgggcattgcctacttaatttccggtattggtttggggcgattgatcagtattttattcttcggtgtgatctccgataagtttggtcgtcgggcggtgatattaatggcagtaataatgtatctgctattcttctttggtattcccgcttgcccgaatttaactctcgcctacggtctggcagtgtgcgtaggtatcgctaactcagcgctggatacgggtggctaccccgcgctcatggaatgctttccgaaagcctctggttcggtggtcatactggttaaagcgatggtgtcatttgggcaaatgttctacccaatgctggtgagctatatgttgctcaataatatctggtacggctatgggctgattattccgggtattctgtttgtactgatcacgctgatgctgttgaaaagcaaattccccagccagttggtggacgccagcgtagctaatgaattaccgcaaatgaacagcaaaccgttagtctggctggaaggtgtttcatcggtactgttcggtgtagccgcattctcgaccttttatgtgattgtggtgtggatgcccaaatatgcgatggcttttgctggtatgtcagaagctgaggcattaaaaaccatctcttattacagtatgggctcgttggtctgtgtctttatttttgccgcactactgaaaaaaatggtccggcccatctgggctaatgtatttaactctgcactggcaacaataacagcagccattatctacctgtacccttctccactggtgtgtaatgccggcgcctttgttatcggtttctcagcagctggcggcattttacagctcggtgtttcggtcatgtcagagtttttcccaaaaagcaaagccaaagtcaccagtatttatatgatgatgggtggactggctaactttgttattccgctgattaccggttatctgtcgaacatcggccttcaatatatcattgttctcgattttactttcgcgctgctggccctgattaccgcaattattgtttttatccgctattaccgcgtttttattattcctgagaatgatgtgcggtttggcgagcgtaaatttagcacccggttaaacacaattaagcatagaggttaaaggagttaattatggatgttaccgcaaaatacgaattgattgggctgatggcctatcctatccgccacagtttatcgcctgaaatgcagaataaagccttagaaaaagcgggattgccatttacctatatggcctttgaagtggataacgatagttttcccggagcaattgaaggattaaaagccctcaaaatgcgcggaactggtatatcaatgccgaacaaacaactggcgtgtgaatatgttgatgaattaacgccagcagccaaactggtgggtgccatcaacaccatcgttaatgatgatggctacctgcgcggctataacaccgacggcacgggccatattcgcgccattaaagagagcggttttgatatcaaaggcaaaacaatggtgctgttaggggccggaggtgcctcaacggcgattggcgcgcagggggcaattgaaggtttaaaagaaattaaactctttaaccgtcgggatgagttcttcgataaagccctcgccttcgcgcagcgggttaacgaaaacaccgattgtgtcgtcacggttaccgatctcgccgatcagcaagcctttgctgaagccctggcttccgccgacattttaaccaatggcacaaaagtgggtatgaaaccccttgagaatgaatcattagttaatgatatcagtctgttacatccgggactgctggtcactgaatgcgtgtataacccgcatatgacgaagttattgcagcaggcgcaacaagctggttgcaaaacgattgatggatacggcatgttgttgtggcaaggggctgaacagttcacgttatggactggcaaagatttccctctggaatatgttaaacaggtcatggggttcggtgcctgacaggctgaccgcgtgcagaaagggtaaaaaatgaaaaccgtaactgtaaaagatctcgtcattggtacgggcgcacctaaaatcatcgtctcgctgatggcgaaagatatcgcccgcgtgaaatccgaagctctcgcctatcgtgaagcggactttgatattctggaatggcgtgtggaccactttgccgacctctccaatgtggagtctgtcatggcggcggcaaaaattctccgtgaaaccatgccagaaaaaccgctgctgtttaccttccgcagtgccaaagaaggcggcgagcaggcgatttccaccgaggcttatatcgctctcaatcgtgcagccatcgacagcggcctggttgatatgatcgatctggagttatttaccggcgatgatcaggttaaagaaaccgtcgcctacgcccacgcgcatgatgtgaaagttgtcatgtccaaccatgacttccataaaacgccggaagccgaagaaatcattgcccgtctgcgcaaaatgcagtccttcgacgccgatattcctaagattgcgctgatgccgcaaagtaccaacgatgtgctgacgttgcttgccgcgaccctggagatgcaggaacagtatgccgatcgtccaatcatcacgatgtcaatggcaaaaactggcgtaatttctcgtctggctggtgaagtatttggctcggcggcaacttttggtgcggtaaaaaaagcctctgcgccagggcaaatctcggtaaatgatttgcgcacagtattaactattttacatcaggcataagcaataatatttcggcgggaatatcctccccgccgaactaaaaaaatatattcaaccgtatttaataaaaatatttcgtgagtctctgtgcgctaattatccatctggcgtagggaaaatcacacctgaatcaggaattaacaatgaaacctgtaaaaccacctcgtattaatggacgagtgccggtcctgtcggcacaggaagcggtgaattatattcccgacgaagcaacactttgtgtgttaggcgctggcggcggtattctggaagccaccacgttaattactgctcttgctgataaatataaacagactcaaacgccacgtaatttatcgattattagcccgacagggcttggcgatcgcgccgaccgtggtattagtcctctggcgcaagaaggtctggtgaaatgggcattatgtggtcactggggacaatcgccgcgtatttctgaactcgcagaacaaaataaaattattgcttataactatccacaaggtgtacttacacaaaccttacgcgccgccgcagcccaccagcctggtattattagtgatattggcatcgggacatttgtcgatccacgccagcaaggcggcaaactgaatgaagtcacgaaagaagacctgattaaactggtcgagtttgataacaaagaatatctctattacaaagcgattgcgccagatatcgccttcattcgcgctaccacctgcgacagtgaaggctacgccacttttgaagatgaggtgatgtatctcgacgcattggttattgcccaggcggtgcacaataacggcggtattgtgatgatgcaggtgcagaaaatggttaagaaagccacgctgcatcctaaatctgtccgtattccgggttatctggtggatattgtggtggtcgatccggatcaaagccaactgtatggcggtgcgccggttaaccgttttatttctggtgacttcacccttgatgacagcaccaaacttagcctgcccctaaaccaacgtaaattagttgcgcggcgtgcattattcgaaatgcgtaaaggcgcggtggggaatgtcggcgtcggtattgctgacggtattggcctggtcgcccgggaagaaggttgtgctgatgactttattctgacggtagaaacaggtccgattggcggaattacttcacagggtatcgcctttggcgcgaacgtgaatacccgcgccattctggatatgacgtcccagtttgatttttatcacggtggtggtctggatgtttgttatttgagttttgctgaagtcgaccagcacggtaacgtcggcgtgcataaattcaatggcaaaatcatgggtaccggtggatttattgatatcagtgccacctcgaagaaaattattttctgcggcacgttaactgcgggcagtttaaaaacagaaattgccgatggcaaattgcatatcgtccaggaaggacgggtaaataaatttattcgggaactaccggaaattacttttagcggaaaaatcgcgctcgaacggggactggatgttcgttacatcaccgaacgtgctgtattcacgctgaaagaagacggcctgcatttaatcgaaatcgcccctggcgtcgatttacaaaaagatattctcgacaaaatggacttcaccccagtgatttcgccagaactcaaactgatggacgaaagattatttatcgatgcggcgatgggttttgtcctgcctgaagcggctcattaataggagtataatgatggatttttctttaactgaagaacaagaactgctgctggccagtattcgcgaactgattacgactaactttccggaagagtatttccgcacctgcgatcaaaacgggacatatccgcgtgagtttatgcgggcgctggcggataacggtatttccatgcttggcgtgccggaagaatttggtggtatccctgcggattacgtcacccaaatgctggcgctgatggaagtgtcaaaatgcggtgctccggcatttttgatcaccaacggtcaatgtattcacagtatgcgccgtttcggttctgcagagcagctacgtaaaacggcagaaagcaccctggaaacgggtgatcccgcctatgccctggcgttgacggaaccaggtgctggctcagataacaacagtgccactaccacttacacgcgtaaaaacggcaaggtctacatcaacggacaaaaaacctttattaccggtgcgaaagagtacccgtatatgctggtgttggcgcgcgatccgcaaccgaaagatcccaaaaaagccttcaccctgtggtgggtcgactccagtaagcccggcattaagattaacccgctgcataaaatcggctggcatatgctcagcacctgcgaagtctatctcgacaacgtggaggttgaagagagcgacatggtgggcgaagaaggaatgggtttcctcaatgtgatgtacaactttgagatggagcgcctgatcaacgccgcgcgcagcaccggctttgccgaatgcgcctttgaagatgccgcccgctatgccaaccaacgtatcgcttttggtaagcccattggtcataaccagatgatccaggaaaaactggcgctgatggcgattaagatcgacaacatgcgcaacatggtgctgaaagtggcatggcaagccgatcagcatcagtcactgcgcaccagcgcggcgctggcaaaactgtattgcgcacgtaccgcaatggaagtcattgatgatgcgattcaaatcatgggcggtctgggctataccgatgaagcgcgcgtctcccgcttctggcgtgatgtccgttgtgaacgtatcggcggcggtacagacgaaattatgatttacgtagcaggtcggcagatcctgaaagactatcagaacaaataatctgcaggcggcgcagcttcttaacaaactgcgccgccagatttatccaacaagacttaccggttgaggaaattcagataggatttcttgttccgcaaaacagtttttaaattgtctacggtaatcgctgggcgaacaaccgacatggcgcaaaaacagtttggcaaagtgatcgacattttcataacccacacgccaggagatctctgcctgtgataattcagtattagtgagtgaccattttgcttccgtcatacgccgttgaataacatagttaataggggaaatacgatactctttggtaaattcatggcaaatataactgacgctggcacgaaattttttcgataactgttctaaagtgattttttcgcgataattattattcagatagaaaagaatatcttttatcagaacatcttttttaatatacccctgctccgaacgataagcatttttaaaattttcgtagtaaagaatggctaacgtataggcaaatgcatcccataacgaagatgtttggctatttttactttgcggcaaaatcacacttagctcattaaataaggtttttatgacttcttttccctgccccgcggcaattaccggacaagaatgcggttgcagtagctgattttcctcagccccctgaaactgaaagccgtacagcgcacaggtacacgtcgttgccggatcgttaacgtcagaggccaccacatgtagcctgccgcgttctatcaccacaatgtcatccgcatgtgcgacatataacgaagaatcgatggtaaaccttgcaacccctttcttgacgtaaatcaactcggtttcattgtcatgaacgtgatgtccggactcccattttggatcatcgctaaatgcaaaacgtgaaagccgtggcgttttaccggcgacaaacagcgtttcactggcattatcaaaacagcgttgatacatgacaacctccctattccatgagcaagcaaaaacaatatatgccggataaaatacggcgtgtattgcggttatacaaccgcgtttagcgagagctaaacaagattatttacactgaatgcaagattgtacggtcatggaataactatattgccgcaaattgcacttttgttttagcgatcgcattttttttgcaagattgttggcaaggaaaacagcttgctccgtcgaaaaccccgcaccgctatcgcacactattttcaggccatttttaccttccatcggagatggttccgtatgcgactcacaggagaaatcatgaaaataataacctgctttaagctggtgcctgaagaacaggacattgttgtcactccagaatacaccctgaatttcgacaatgccgacgccaaaatcagccagttcgatctcaatgccattgaagctgcaagccagcttgcaacagatgacgatgagatagccgcgctgaccgttggcggctcattgttgcagaactcgaaagtgcgcaaagacgtgctatcccgcgggccgcacagcctgtatttggtgcaggatgcgcaacttgaacatgcactgcctctcgataccgcaaaagcgctggcggcagcagttgaaaagatcggcttcgatttactgatctttggtgaaggttccggcgacctttatgcccagcaggttggcttgctggtcggagaaattctgcaacttccggtgattaatgcagtgagtgctattcagcgtcagggcaatacactggtgattgaacgcacgcttgaagatgatgttgaagttattgaactctctgttccagccgtgctctgcgtcacctccgatattaacgtgccacgcattccttcgatgaaagccattctcggcgcgggtaaaaaaccggtaaatcagtggcaggcaagtgatattgactggagccagagcgcgccacttgctgaactggtcggcattcgcgtaccgccgcaaacagaacgtaagcacatcattatcgataacgattcgccggaggccattgccgagctggcggaacatctgaagaaagccctgaactgaagcctacggagaagaaacgatgagtcaattaaacagcgtctgggtctttagcgataatcctgaacgttatgctgaactgtttggcggcgctcagcaatggggccaacaggtgtatgccattgtacaaaataccgaccaggcgcaggcagttatgccttatggtccaaaatgtatttatgttcttgagcaaaacgacgcgctgcaacgcactgaaaattacgccgaaagcattgctgccctgctgaaagataaacaccccgctatgttgctgttggccgcgacgaaacgtggtaaagctctggcagcacggttaagtgtgcaactgaatgcggcgctggtgaacgatgccacggcggtggatattgtcgatggtcacatttgcgccgaacaccggatgtatggcgggttagcgttcgctcaggaaaagatcaacagcccgctggcgatcattacccttgcacccggtgttcaggaaccgtgcaccagtgatacctctcatcagtgcccgacagaaacggtaccttatgttgctccgcgtcatgaaattctctgtcgcgaacgccgtgcgaaagccgcaagcagcgtggacctgagcaaagcaaaacgtgtggttggcgtcggtcgtggtctggcggcgcaggatgacctgaaaatggtccacgaactggcggcggtgctgaatgctgaagtcggctgttcacgtccaattgccgaaggcgagaactggatggagcgtgaacgttatatcggtgtctccggcgtgttgctgaaatccgatctctacctgacgctggggatctccgggcagatccagcatatggttggcggcaacggcgcaaaagtgattgtcgccatcaataaagataaaaatgcgccaatcttcaattatgccgactacggtctggtgggcgatatctacaaagtcgtccctgccctgattagccagttgagccgctaattcccctttcaaccacatctcccgctgtaaacgcagcgggaagggagcataacgcatgtcggaagacaaatttgatgccattgtggtcggtgcgggcgttgctggtagcgttgccgcactggtcatggcgcgagccgggctggatgtcctggtgatagaacgcggcgacagtgccggatgtaaaaacatgaccggcgggcgtctttatgcccacacacttgaagcaatcattccaggctttgcagtatcagcgccggtagaacgcaaggtcacacgcgagaaaatctccttcttaaccgaagaaagcgccgttaccctcgattttcaccgcgagcaaccagatgttccgcaacacgcatcttataccgtattgcgtaatcgtctggacccgtggttgatggaacaagccgagcaggcgggcgcgcagtttatcccaggcgttcgcgtcgatgcgctggttcgtgaaggaaacaaggtcactggcgtgcaggctggggatgatattctcgaagcgaatgtggtgattctggctgatggcgttaactcgatgcttggccgctcgctgggaatggttcccgcttccgatccgcatcattacgctgttggtgttaaagaggttattggcctcacaccagaacagatcaacgatcgctttaatattacgggcgaggaaggtgccgcctggctgtttgccggttccccttctgacggcctgatgggcgggggatttctctataccaacaaggattccatatccttggggctggtttgtggattgggtgatatcgcccatgcgcaaaaaagcgtgccgcaaatgctggaagattttaaacaacaccccgccattcgcccactaattagcggcggcaaactgcttgaatattccgcgcatatggtgccagaaggcggtctggcaatggtgccgcagatggttaacgatggcgtgatgatcgttggtgacgccgcaggcttctgcctgaatttgggttttacagttcgtggcatggatttagccattgcatcggctcaggctgccgccacaacggtgatcgccgccaaagaacgcgaggatttctccgccagcagtctggcgcaatacaaacgtgagctggaacaaagctgcgtcatgcgcgatatgcagcatttccgcaagatcccggcgctgatagaaaacccgcgcctgtttagccaatacccacgaatggtcgccgacatcatgaacgagatgttcaccattgacggcaaaccaaaccagccggtacgcaaaatgatcatgggacatgcgaagaaaattgggctgatcaacttgctgaaagatggcattaagggagcaaccgcgctatgagccagaacgctacggttaacgtcgacatcaaattaggcgtcaataaattccatgttgatgagggccacccgcatatcattctggcggcaaatcccgatatcaatgaattccgtaaattaatgaaagcctgccctgccggactttataagcaggatgacgccggcaacattcattttgattctgccggttgtctggagtgcggcacctgtcgggtgctgtgcggtaacactattctcgaacagtggcaatatcccgcaggcaccttcggtattgattttcgctacggctaatcatgcatcccacaggcccgcatctcgggcctgatgttctgtttcgagagtccaacatgaaagtgacattaacgttcaacgaacaacgtcgtgcggcgtatcgtcagcaagggctatggggcgatgcttcgctggccgattactggcagcagaccgctcgtgcgatgccagacaaaattgccgtggtcgataatcatggagcatcgtacacctatagcgcgctcgatcacgccgcgagctgtctggcaaactggatgttagcgaagggtattgaatcaggcgatcgcatcgcatttcaactgcctggctggtgtgaatttactgttatctatcttgcatgcctgaaaatcggtgcggtttccgtaccgctgttgccttcctggcgggaagcagaactggtatgggtgctcaataagtgtcaggcaaaaatgttctttgcaccgacgttgtttaaacaaacgcgtccggtagatttaatcctgccgctgcaaaatcagcttccacaactacaacaaattgtcggcgtggacaaactggctcccgccacctcttccctctcattaagtcagattatcgccgacaataccccactgaccacggcgataacgacccacggcgatgaattagctgcggtgctgtttacctccggaaccgagggtctgccaaagggcgtgatgctaacgcataacaatattctcgccagtgagcgggcttattgcgcgcggctgaatctgacctggcaggatgtctttatgatgcctgcgccactcggccacgcaacgggctttctgcatggcgtaacagcaccatttttgattggtgctcgcagcgtgttgttagatattttcactcctgatgcgtgtctcgcgctgcttgagcagcagcgttgcacctgtatgctcggcgcaacgccgtttgtctatgatcttttgaatttactagagaaacaacccgcagacctttcagcgctgcgcttctttctttgcggcggtaccacaatccccaaaaaagtggcgcgtgaatgccagcagcgcggcattaaattattaagtgtttatggttccacagaaagttcgccgcatgcggtggtgaatctcgatgatcctttgtcgcgctttatgcacaccgatggttacgctgccgcaggtgtagagattaaagtggtcgatgacgcacgcaagaccttaccgccaggttgcgaaggtgaagaagcctcgcgtggccccaatgtgtttatgggatattttgatgaacctgaattaaccgcccgtgcgctggatgaagaaggctggtattacagcggcgatctctgccgtatggatgaggctggctatataaaaattaccggacgcaaaaaagatattattgtccgcggcggcgaaaatattagcagccgtgaagtggaagatattttattgcagcatcctaaaattcacgatgcctgtgtggttgcaatgcccgatgaacgtttaggtgaacgatcatgcgcttatgtcgtgctgaaagcgccgcatcattcattatcgctggaagaggtggtggcttttttagccgtaaacgggtcgcaaaatataaatatcctgaacatatcgtggtaatcgaaaaactaccgcgcactgcctcaggtaaaatacaaaagtttttgttaagaaaagatattatgcggcgattaacgcaggatgtctgtgaagagattgaataagtttcatcttcggggatcacataaacccggcgactgaacgccgccggggatttattttatttcttcagttcagccaggcttaaccaggtttgcaccacggtgtccgggttcagagacaggctatcgatcccctcttccatcaaccatgcggcaaagtcttcatggtcggacggaccctgaccgcaaatcccgacatatttgccctgtttcttcgcggcacggatagccatcgacagcaatgctttcaccgcatcgttgcgctcatcgaacagttcagacaccactccggagtcacggtccagaccgagcgccagctgtgtcatgtcgtttgagccaattgagaagccgtcgaaatattcgaggaactgctctgccagcaaggcgttggacgggatttcacacatcatgatgattttcagcccgttctcgccacgtttcagcccctgacgcgccagttcttcaaccaccgctttcgcctgatctacggtacgcacgaacgggatcatgatctcaacgttggtcagccccatgtcattgcgcacacgtttcactgcttcacactccagcgcgaaacagtcgcggaagctgtcggaaacatagcggcccgcgccacggaagccgagcatcgggttctcttcatctggctcgtaacgctcaccaccgaccaggttggcatattcgttcgatttaaaatcagagagacggacaatgacgcgcttcggataaaacgcggcacccagcgtcgcgatcccttcagtcagacgaccaacgtaaaattcacgcggagaatcaaaacctttcatcatctcgcggatttcgttttgcaactgcggttcctgatcgtcaaactcaagcagtgcgcgtgggtggacgccaatcatacggttgatgataaattccagacgcgcaaggcccacgccttcgttcggcagacaggcgaagtcgaaagcacggtccgggttaccgacgttcatcatcactttcaacggcagatccggcatcgtttctacgctggagcttttcacgctaaattccagcaactccgcatagacgtaaccggtatcaccttcggcacaagaaacagtgacgttctcaccgtctttcatccgttctgttgcatctccacagcccactaccgccggaatgcccagttcacgagcgatgatcgccgcgtgacaggtacgaccgccacggttggtgacgatggcagatgctttcttcatgatcggttcccagtccgggtcggtcatatcagtgaccagcacgtcaccaggttcgatgcggttcatttcgctgatgtcatggatgactttcaccggacccgcaccgatgcgatgaccgatagcacggccttcggcgataatcttaccctgtgaatgcagcgtataacgctccatgacctgaccgcgtgagcgcacggtttccggacgcgcctgcacaatgaacagtttgccggtgtggccatctttcgcccactcaatatccattgggcgaccgtagtgtttctcaatttgtacggcctgttttgccagttcctgcacttcttcgttggtcagcgagaagatgtcacgctgttcctgcggtacgtcttcgattttaacctgcttgccgtgctcctgggtcggcgcataaaccatgcggatttttttcgatcccatggtgcggcgcacgatagccgggcgattcgccgccagtgtcggtttatggacgtaaaactcatccgggttaaccgcaccctgcacgaccatttccccaaggccccatgcggaagtgataaacaccacctggtcaaagccggattcggtatcaatggagaacatcacgccagaagatgcgaggtcggagcgcaccatccgctgaacaccggcggagagcgccacgccacggtgatcgtaaccctggtgcacacgataagagatggcgcgatcgttaaacagagaagcaaatacatgtttcactgccacgagaacggcgtcaaaaccctgaacgttgaggaaggtttcctgctgaccggcaaaagaagcgtccggcatatcttctgcagtagcggaggaacgcaccgcaaacgaggcgttttcgtcatcggcggaaagctgtgcataggcttcgcggatggcgttttccagctcaggctggaagggagtgtcgataatccactggcggatttgcgcgcccgctttcgcaagctgagtaacatcgtcaatatccgttttatccagcagttcataaatgcgctggtttacgccgctttggtccagaaactggttaaacgcgtcggcggttgtggcgaaaccattcggaacggaaacacccattccggaaaggttagtaatcatttcacccagggaggcatttttgcccccaaccctgtctacatcattcatgccgagttggttataccaaagcaccagcggtgacgagccattgttggacatcgaacaatccttttgtgataaatgaacggtttgagaaacacatttctgcgcatttatctttgcatatttaaccggatgaaaaaaacggtgaatcgttcaagcaaatatatttttttactttttaagactgatcccagcgttgcgcaaatctgctctcttcgacaatttccacataaaccatcggtataaacgaaaccataaaaatgaaatactgttttcataaaaaataaaattgaaggttcattttataaaccagacattacgtcctacgcttctgtgcgtttttaatttatgctttcatagaattatgtctgcatcacgggaagaacaaaatggataatgctgttgatcgccacgttttttatatttctgatggtacggcaataactgcggaggtattaggacacgcagtaatgtcacaatttcccgtcactatcagcagcattacgctgccgtttgtcgaaaatgagagccgtgcacgggcagtgaaggatcagattgacgccatttatcaccagacaggtgtgcgcccgctggtcttctactccatcgtgttgccggagattcgcgccatcatcttgcaaagtgaaggcttttgccaggatatcgttcaggcgctggttgccccgctacaacaagagatgaaactggatccaacgccgattgctcatcgtacccatggccttaaccctaataatctcaataaatatgatgcgcgcattgcggcgattgattacacccttgcccacgatgacggtatttcgttgcgcaatctggaccaggctcaggtgatcctgctcggcgtttctcgctgtggtaaaacccccaccagtctgtatctggcaatgcaatttggtatccgcgcggcaaactacccctttattgccgacgatatggataatctggtgctacccgcgtcgctcaaaccgcttcagcataaattgttcggcctgactatcgacccggaacgtctggcggcgattcgcgaggaacgtcgggagaacagccgctatgcctcgcttcgtcagtgcaggatggaagtcgcggaagtagaagcgttgtaccgtaaaaatcagatcccgtggattaacagtaccaattattcggtagaagagattgccaccaagatcctcgatatcatggggcttagccgccgaatgtactagagaactagtgcattagcttatttttttgttatcatgctaaccacccggcgaggtgtgacacacctcgcacttgaaatcagctgcgattggtttatcgtgatgcgcatcacttcccggtagtcctgccgtagaagcaacaaatttctgagacttgtaatgaacagaactgacgaactccgtactgcgcgtattgagagcctggtaacgcccgccgaactcgcgctacggtatcccgtaacgcctggcgtcgccacccatgtcaccgactcccgccgcagaaatgaaaaaatactgaatggtgaagataagcgactgttggttattattggcccctgctcgatccacgatctcaccgctgcaatggagtacgccacccgtctgcagtcgctgcgcaaccagtaccagtcacggctggaaatcgtaatgcgcacctattttgaaaaaccacgaactgttgtcggctggaaagggctaatctccgatccggatttaaacggcagctatcgggtaaatcacggtctggagctggcgcgcaaattacttttacaggtaaatgagctgggtgtccctaccgcgactgagttcctcgatatggtgaccggtcagtttattgctgatttaatcagttggggcgcgattggcgcacgtactaccgaaagtcagatccaccgtgaaatggcttcggcactctcctgtccggtaggttttaaaaatggtaccgatggcaacacgcggattgccgtggatgctatccgcgcagcccgcgccagccatatgtttctctcgccagacaaaaatggtcagatgaccatctatcagaccagcggcaacccgtatggccacattattatgcgtggcggcaaaaaaccgaattatcatgccgatgatatcgccgcagcctgcgatacgctgcacgagtttgatttacctgaacatctggtggtggatttcagccacggtaactgccagaagcagcaccgtcgccagttagaagtttgtgaggatatttgtcagcaaatccgcaatggctctacggcgattgctggaattatggcggaaagtttcctgcgcgaaggaacgcaaaaaatcgtcggcggtcagccgctcacttacggtcaatccattaccgacccgtgtctgggctgggaagataccgaacgcctggtcgaaaaactcgcctctgcggtagatacccgcttctgaatgcgtgcccattcctgatgggatgggcatttctgcgcaacttgttgtcttttcaacacattactgcttgctctggcctgccataatattgataataagaatcattgttatatcaattattattaatttttatgcgttatacggatagcagaaaactcacgcctgaaacggatgccaatcacaagaccgcttccccgcagcccatccggcgaattaccagccagacactgttaggtccggatggcaaactgattatcgatcatgacgggcaagaatatctgctccgtaaaactcaggctggcaagctgctgttgaccaagtagcctttaactcgagcagctgacttccagccgtttaccccagtcaggtggacgactgacatagtcatcagctctgtcgctgaaaggatttcgcaacgcctcatgcaggcggtgcaattccgtcatatcacccttttctgccgcttcaatcgcccgttgcgccaaccagttgcgcaacaccagagctgggttaacgctttgcatcagttgctgacgctcaatatcgctaacctcgtcttgttgcaaacgcctccgataacgggcaaaccagtcatcaaatgccgcacgatcaataaactcatcacgtagcggtgacgccgcgctgtgctgctcggtcagactcagcatgcggaatgtgcgggtataatcgctgcgctctcgcgccatcagactgaataattcattcagtagcgcgttatcctctttttgctccgtcatgaagcccagtttctgccgcatccgttgtccataatgcgtcaacaaaacctgctgatagctgtccagggcctcattcagggcatctacggcaacaaatggtgacaatgtctgcgccagacgctgtaaattccacaacgcgacggcaggttgattatcaaagctgtaacgcccttgatgatccgagtgattacaaataaaaccgggttcgtaatcatcaagaaaaccaaacggcccgtaatcaagcgtcagccccagcagcgacatgttgtcggtattcatcaccccatgagcaaagccgaccgtctgccattgggcaattaacgatgcggtacgtgcgacaacatcgttaaaccagagacggtatttgtcctcatcatcttcaagatgtgaccagtaatgacgaatggcaaagtcagctaactgacgaaccttttccggctcgcggcgatagtaaaaatgttcgaaatgaccaaagcgcagatgacttggtgccacacgcatcagcatcgcacctggctctaccgtttcccgatacactggcgaatcgctggtgacgatacttaacgcgcgggtcgtcggaatgcccagataatgcatcgcctcactggcgagactttctcgtatcgtcgaacgtaaaaccgcccgtccatcacccattcgcgaataaggcgtcaggccagcacctttcagatgccagtccattgtagtgccatcagcaagcagttgttcgccgagtaaaatacctcgcccatcacccagttggcccgcccagacgccgaactgatgaccactgtaaacctgcgccagtggtgacataccaggcagtagggtttcgccgccccagacacctgcgccatttttaaacagcgacgatggaatactcagcgtgttagcgagttcggtattatgccaaatcagccgggcattatttaaaggcgtaggggaaagtgctgtataggttgctggcaattcatcgcgccagcgggtaataaaagacagggtcatagatcctcctgtttaatagtgtagacggttactctcgtcttaaacaccagcaaacaggagggttatcgctgaaccaacgtcgttatctgatttataggaacggcaggccacaggcatccctggagagcatggaaatcgaagggggtaatctgtgccaatatttctgtcgtatcaatgccccccgcgatgatgcaattgcaacaaggggaaatttgcgcctggatcgcacgaataaacggttcgaaggagcgatgcgtgatttgttgctgaataaaacttttatccagcatgacgcgggtgaaaagaccatcaaaaaccgctttcattgtgctattacctgctcccaaattgcctaacacaaggggatacatttgcgataaggataaaagatcgcgattatcttttccttcattgagatgcgggtaattctcattaatcaacagttcaataaacggatattttaatagttcgcctgcgtaattatccctctctaataataatgtagccacttgtggcgttaaattaagccaggcaaagagtttatgttgaataaaaaaatgttggcatgattttagtaattccaactgctctgaaaataattgccaatgttgctcctcggtaagttgcgctataacccgactcgtcgggatacgaaccgtaccatcttcactggagaaatgggtaattaactcaacgccgacaaggtcttgctggttatctcttatcggcaggaaatagcaatcagaatgataaagattctccaaaaaaatcttcatggtaaccgtccctctcgaaggatgtttttcagtatccggctaaaagggatgaggccataagacataacaattacataaggagtaactttcatttgttccatgttaaccactttttcaggggtcctttttttagattatcctgattataaacgaataatccatttacggaatttttgtctgcaaaatactactgtattcaggagtaaatggacggcgatgtatcatcgccgtccatttttcgacatactaaattcgtctcgcctgccagaaatttttctgccaatagacattatcaagtgaggaacgcatcactcccttgctggtagaggcgtggataaattggttgttggtatcgtaaatacctacatgcaaaccattttgtccggaacccgttttgaaaaagaccaggtcacctggcagcaactcgtctttatcaatttgcgtgccaatagaggcttgttgtttggtttcacggggcagctgcaaatcgaaacgatcgcgcatcgtcacaaccacaaatcccgaacagtccacaccgcgccgcgtcatgccaccataacgatacggcgtgccatgccagctttgtagctggtcgttcaaaccggcaataacggtaatcgaatcagaaagtctggcatttggcggcggtgctttatggtggctacacccggccagaagcagtgctgtgatcaaaataaggcagaaacgcattccgtacggttcctctgttttttattcttgcattaatttagcgtcgtaattacccgattttcaagatactaatgaaatcagatggtcgaaatcagcattctgtgaccttcgatatccagacggcgaaaattcatcccataggcctgcgccagatttggcggcgtgagcacctcttccctgcgtccactggccagcatttttccaccttttagcaaccacgcccgatgcgcatgacgcaatgtgtggttgagatcgtgactgctcatcacaatcgccagtccttgctgacacagcgcgctcagaattttgtctaacgcactttgttgcgcaacatcaagactgttcatcggctcatcaagaagcagcaattggcctgcgggattggcttgtggtgtgatttgcaacaccaccgcagcaagacgtacgcgttgccattcaccgccggaaagttgattggtgctacgtccgagtttgtcatcaagagccagcgcccctgcgacatcattcagtagttcggtacgcgttttatcgtgctgatgcagtgtcaggtagtgccagaccggcattgcaaacggcggcgtctgctgttgtgaaagataggcgcgatgcagcgcgagttttgttgcggaccatgcttccagtggttgccccgcgaactgaatgcttcccttaccgctggtcattccggccattcgcgccagtaaggtactcttacccgcgccattcggccccaccaggtgcaggatctccccagcccgaacctcgccagaaagcggccccaggcgggtagattccgcaacatcttgtaactgcatcacaatagacattattttgccaacgccagtttaatgctttccatcacaatgggatcttccggcgtcatatccggggaaaaacgctggatgacttttccgtccctgccaaccaggaatttttcaaaattccataaaatatcatccgggtacagcggtgcacggcctttgctgaccatacgggcatagaatccgctctcttccggcgcgactgcggtcggcgctgcggcaatcaatttttgatacagcggatggcgtccttcgccattaacttcaatcttactgaacatcgggaacgtcaccccccatgtggtggtacagtaagttttaatctcttcatcgctgcccggttcttgttccagaaactggttgcacgggaatcccagcaccacaaaacctcgatcggcccaggctttctgaatattctccaactgctcatattgcggcgttaagccacactttgaggcgacattgacaatcaacagcacattaccggcgtacttctccagcgtggtcacttcaccgtcgatatctttcactacggtcgtcagaatggaatcttgcatcgtttctcctgggtgtggtcagtaaaaatcttagcttttaatcatagaccgtctttttgcggctaacgtcttgcttttaacaataaccagataaacaccggcgcacccaacgttgcggtgaccacgccaataggcagctctgcggcagctaatgccaggcgcgctacaatatcggccagcagcaatgcgctcgcccctgccagcgcgcagccgggaagtaatacgcgatgatcggttaaaccacacagccggagaatatgtgggatcaccagaccaataaagccgatagcacccgccagcgccacactgacgccaaccatccagccggtcgctgccaccagcacattgcgccagaaccacaggggtaaacccagttgccgcgccgagatctcgccaagtgctaacatattcatcggcctggactgacaacagatccacaacaacacggggatcaatgccagcatcagccagctttgccgccagtctacgccgccaaaaccgcccatcatccagtacatcagctgacgtaaatcaacagaggtggaaaagtagatagcccacgtcattagtgcgctacagataatccctaatgcaacgccagccagcaataaccgactggtcgaaagatgacgacgggcgaaacgtaagagtattaaagtgatgataagcgcgccagcaatcgcacacagccctagcgcccagttggggagttgcccttgcccaagcaataccgcggcgataagccctacgcctgcgccgttagagacgccaagtagtccaggttctgccagaggattttcaaacaacgcctgcattactgcgccggatatagccagcgccgcaccaaccagcaatacagccagcgtacgtggcaggcgaatctgccagacgaacagttcgccacgaggagaaaaccagtcacctggcgagatccattgttcaccggcgcaaaggcttaagagaagcgccagcagcatcaaaactgacaggcataataaccagcgaatattttgtcgctgttgttggcgggcaagtgtcagcatggtatccgttctgctgaagtgtcatggcgttgattttacggtgactcttcgacagtgaaaagaaaaaggccgcagagcggcctttttagttagatcagattactcgtctttgggcgaagcgttttcgacccggctttttaacttctgcccgggtctgaaggtcaccacgcgccgtgctgtaatgggaatatcctcgcccgttttcgggttacgtcccgggcgttgattcttatcacgcagatcgaagttaccaaaaccagagagtttcacctgttcgccgttttccagagcgcgacggatctcttcgaaaaacagttcaaccagttctttggcatcccgcttgctaagcccaagcttatcaaacagatattctgacatttcagcttttgtaagcgccataggttcaatccctcaatgatgcctggaatcgctcttttaatgcctctacacatttggcgacggtagcggcaatctcctcttcttcgagtgtacggctggtatcttgcaggatcaggcttatggcgaggctcttatacccctccgcaacacccttaccgcggtacacgtcaaataagtttacgccaactacctgatttacgccaactttcttacattcggataaaatatccgctgcgggaacgttttctgcgaccaccaccgcgatgtcacgacggttcgccgggaagcgagaaatctcgcgcgcctgaggcaccacgcggtctgcgagcttgttccactccagttcgaacaccagagtgcgaccgttaagatccagtttacgttccagttcaggatgaacaaccccaacaaaaccaatacgttcacctttcagataaatcgctgcggattgccccggatgcagtgccggattcgcttctgcacggaactcaacctcattcagtttaccggtcaggtcgagaacggattcaagatcgcctttcaaatcatagaaatcaacggtctcttttgccaggttccagtgctcttcgtaacggttaccgcaaatcacaccggctaacatcagatcctgacgaatgcccaacggtgcctgagtatctggtacgaaacgcagaccgctttcgaaaatgcgcacacggttctgctgacggttctggttgtacaccacggttgccagcaggccggtccacagagaaagacgcattgctgacatttcaacagagatcgggcttggcagcagtaaggcttcaacgcctggatggatcatctgctgcactttcggatcaacgaagctgtaggtgatcacttcctgatagcctttgtcgttgagcagcgttttcacgcgcttgagcgacaggtcagcttcacggtgagtacccataatcaggcttgcctgtaccggctcatccgggatgttgttgtagccgtaaacacgcgcgacttcttcgaccagatcttcttcaatctccatatcgaaacgccagctcggcgcaactgcctgccactcgtctttgccttcggtcacttcgcagccgagacgacgcagaatgtcagttacctgctcatccgcaatatgatggccgatcaggcgatccagtttgctacgacgtaaagtgatggttgcacgcttcggcagcgttgcttcgttggtgatatcaattaccggaccagcctcaccaccgcagatgtcgatcagcagacgggtcgcacgttccatcgctttgtgctgcagtgccggatcaacgccacgctcataacggtgagacgcatcagtatgcaggccatgacgacgagcacgaccggtgatagacagcgggctgaagaaagcgcattccagcaagacgttttgcgtttcgtcattcacgccagagtgttcgccaccaaagatgccgcccatcgccagcgccttgttgtggtcggcgatgaccagagtgtcagcattcagcttcgcttcagtgccatcaagcagtaccaacgtttcgccctctttcgccatccgcaccacaatgccgccttcaatgcgatctttatcgaaagcgtgcatcggctggcccagttcgagcagtacatagttggtgacgtcaacaactgcatcgatagaacggatcccgcaacgacgcagtttttctttcatccacagcggagttggcgctttaacgttaatgccttttaccacacggccaagataacgcgggcaggcttccggcgcttcgactgtaatcggcagcgtgtcgtcgatggtcgcaccaaccggaacgatttccggttcaaccagcggcagctgattcagcacggcaacgtcacgcgcaacaccaatgatacctaaacagtcggcacggtttggcgtcacgctgatttcgatggtgttgtcatcaagtttcaggtattcacggatgtcggtgccaatcggcgcatccgcaggcagctcgataatgccgctatgatcgtcagaaattcccagctcagaaaaggagcacagcatcccttctgacggttcaccacgcagtttcgccgctttaattttgaaatcacccggcagaacagcaccaatggtagctaccgccacacgcaggccctgacggcagtttggcgcaccgcagacgatgtccagcaggcgatcgccgccaacattcacttttgtcacacgcagtttgtcagcgttcggatgctgcgcacactcaaccacttcaccaacgaccacgccgtggaagctaccggcaaccggttctacaccgtcaacttccaggcccgccatagtgatttgattcgccagcgcatcgctatcaatcgccgggttcacccattcgcgtaaccacagttcactgaatttcataatctattcctgccttatttaaactgtttgaggaaacgcagatcgttttcgaagaatgaacgcaggtcggtgacgccgtaacgcaacatagtcagacgctccatccccatcccgaaggcgaaaccagagtaaacttccgggtcgatgccaacgttacgcagcacgttcggatgcaccatcccgcagcccagcacttccagccatttaccgtttttacccatgacatccacttctgcagaaggttcggtaaacgggaagtaggaaggacggaagcgaatctgcaaatcttcctcaaagaagttacgcaggaagtcgtgcagcgtgcctttcaggttggtaaagctgatgttggtatcaacaatcagaccttccatctgatggaacatcggcgtgtgagtctggtcgtagtcgttacgataaacacggccaggcgcgatgatacgaatcggtggctgctgggctttcatggtgcggatctgtacgccagaggtctgggtacgcagcaggcgggtagcgtcaaaccagaaagtgtcgtggtcagcgcgcgccgggtggtgaccaggaatgttcagagcatcgaagttatgataatcgtcttcgatttccggcccggttgccacggtaaagccaagctcaccgaagaaactttcgatacggtcgatggtacgggtaaccggatgcagaccgccgttttcaatgcgacgacctggcagagagacatcaatcgtttccgccgccagacgcgcattcagtgcagcgctttccagttccgctttacgcgcattcagcgcctgctgaacctgctctttcgcttcgttgataaccgcaccagctgccggacgctcttctggcggcagctcacgcagggtcgtcatctgaagggttaagtgcccttttttacccaaatattcgacgcgcacattatctaacgcggcaacatctgacgcctggctaatggccgccttcgcactggcaaccagttctgcgagatgtgacatggttttcctcattgtgtcagtggtgacactggttcgttggacttagagcctatcccatcaggctattttacttgccattttggtcccgggcagtgctcgaaatcctcacgtacttaattacgctccggtttctccgcgctggccgtgtccagactggctgcgacaattacgcctgatagactggctttttatttttcaaaacgcgcatacaaaaaaagcctccactgggaggctttcaggcgctgttttccgtttctcttctcacgcgctagcctcctggattcaggtgctaaagtaaaaaagaagcggaaaatagcagcattcattgcttgcgttaccttttggtactcttcaaaagacctttattgaaaaggctacggcgataaaagtcaatgttttgatggcgttgaaacgaaaagagggagactagctccctctttcaactggcttatgccagagctgctttcgctttttcaaccagagcggtgaacgctactttgtcgaatactgcgatatcagccaggatcttacggtcgatttcaacagaggcttttttcaggccattgatgaatttgctgtaagaaataccgttctgacgtgctgctgcgttgatacgcgcaatccacagttgacggaactgacgcttacgttgacgacggtcacggtaagcatactgaccagctttgataacagcctggaaggcaacgcggtatacgcgagaacgcgcaccgtagtagcctttagcttgtttcaaaattttcttgtgacgtgcgcgtgcaataacaccacgttttacgcgagccatatgtgctctcctgtatctatattctaattaaaaagttaaaaacgttaacggcttatgcgtacggcaggcacgcgattaccaggcccagatcgcctttggaaaccatggctttcggacgcaggtgacgtttacgtttggtcgcttttttggtcagaatgtgacgcaggttagcgtgcttgtgcttaaaaccacctttaccggtttttttgaagcgcttagcagcaccgcgtacggtcttaatttttggcattttaataacttccacttcgcattgttaataaacgaaacaaaggcgaacaatgcctgtgaagcccgaaggctccacagacagtgctacttgaaggccttactgtttcttcttaggagcgagcaccatgatcatctggcggccttcgatcttcgttgggaaggattcgaccaccgccagttcttgcaaatcgtctttcacgcgattaagcacttccataccgatttgctggtgcgccatctcacgaccgcggaaacgcagcgtgattttggctttatcaccctcttcgagaaagcgaatcaggctgcggagttttacctgatagtcgccttcatctgtaccaggacggaatttaatttccttaacctggataactttttgctttttcttctgttccttagaagacttgctcttttcatagaggaatttgccgtaatccattatacgacaaaccggcggctcggcgttagggctgatctcgactaagtctactccggcttcttctgctttctccagagcttctctcagactcacaataccaagctgctcgccttccagacctgttaagcgaacttcctgggcgcgaatttcgccattgatacggttagggcgcgccgtttgaactcgttttccgcctttaataccttattcctccaattgtttaagactgcggctgcgaatctcttgttgcaacttctcgatcacttcatttacgtccatgcttcccaggtctttaccacggcgggtgcgaacggcaactttgcctgattccacctctttatcaccacagaccagcatatatgggacgcgacgcaaagtgtgctcgcggattttaaagccaatcttctcatttctcaagtctgctttaacacgaatgcccgcatttgatagtttttgcgtcaattcgttaacgtaatcagactgtgaatcggtaatattcatgataacaacctgaaccggcgcaagccaggtcgggaagaaaccagcgaattcttcggtcaggataccgatgaaacgttccatcgacccaagaattgcgcggtgaatcattaccggtaccttacgctcgttgtcttcgcctacataagaagcgctcagacgagaaggcaaagagaagtccagctgtactgtaccgcactgccatgcacgatcgaggcagtcatacagggtaaattcaattttcggaccgtagaaagcgccttcacccagttgatattcaaacgggatgttgttttcttccagcgcaaccgccaggtccgcctcagcacgatcccacatttcgtcgctgccaatacgtttttcaggacgagtggagagtttgacgacgatcttctcgaagccaaaagtgctgtacatatcatagactaaacggatacatccgttaacttcatcgcgaatttgttcttcagtacagaagatatgcgcgtcatcctgggtaaatccacgcacgcgcatcaggccatgcagcgaacctgacggctcattacggtggcagctaccaaactcggccatacgcagcggcagatcgcgataagacttcagcccctggttgaaaatttgtacgtgacccgggcagttcatcggcttaatgcagtattcacggttctcagaagacgtggtgaacattgcatctttgtagttgtcccagtgaccggttttttcccacaggacacggtccatcatgaacggacctttaacttcctgatactggtactctttcagtttagaacgaacaaacacttctagttcacggaagatggtccagccgtcgttgtgccagaataccatacccggcgcttcttcctgcatatggtacaggtcgagctgtttaccgattttacggtggtcgcgtttcgcggcttcttccaggcgctgcaggtaagcgttaagcgcttttttgtctgcccacgccgtaccgtaaatacgttgcaacattttgttgttgctgtcgccacgccagtaagcccctgccgttttcattagtttgaaatgatggcagaaacgcatgttcggtacgtgcggaccgcggcacatatcgacatattcttcatggaagtacagacctggcttgtcatcatgggcgatgttttcgtcaagaatggagactttgtagctctccccacggttggcgaaagtttcacgcgcttcgtgccagctgactttcttcttaatgacgtcgtagtttttctcagcaagctcatgcatccgcttctcgagtgcttcgacatcttcctgggttaacgtgcggtcaagatcaacgtcgtaataaaaaccgttgtcaataaccgggccgattgccattttggtatgcggccaaagttgtttaatcgcgtgccctaacaggtgcgcacaggagtgacgaatgatctccagaccgtcttcgtctttggcggtaatgatggacagttgtgcgtcgttttcaatcagatcgcaagcatcaaccagttcgccattaacgcgccctgcgatacaggctttcgccagacctggaccaatgtccagcgcaacatccatggggcttacagcgtggtcgtaatggcgttggctgccatcaggaagagttataacaggcattttatatccttatttgcagtggtgacccacacgaaagatcacatacaaagaaaaatttgtttattaacagttcattgcgaaaccatctagccaacaaatgctaaattggttcgcaatcaggtacacaaatgaaagacattaacctctcaccttccacccggttgagcgatgttaacactaaaaaaagggagattgtacctttccgtttcacattgattcgattcgcaattcgtttgtagtgagtacaccagcaaaacgcttaaagaaccactgataacatcacggtgcgtctgaaaggtttactgcgagcggatttacagcagcataaactgaatccagcaaagttcgttgcgtgatttggcggtagtattttaaacgctcatgagattaatgacaaagtggtcatatcacaatgataaaagtgacacaattcttataacaatttttcgtgcacatttcgttctggcgataataattaatcatcatcctcaaaacctccagatatatataaggcgaatagattatgagtcaaaacgatatcattatcagaactcattataagtctcctcatagattgcacatcgatagcgacataccaacaccttcatcagagcctattaataaatttgcgcgccagctcatcaccctacttgatacctctgacttaagttcgatgctgtcatactgtgttattcaggaatttaccgcaaactgtcgaaaaatatcacaaaattgttattccactgccctttttaccattaactttgccacttcacccatccatgcagaaaatatactcattacattacactataaaaaagatttcatttccttattactggaaaccacgcctattaaagctaaccatttgcgaagcatactggattatattgaacaggaacagttaactgctgaagatcgtaaccattgtatgaaactgtctaaaaaaatccatagagaaaaaactatacacccaacagtaaatctcaatggtagtgcatgttttttgcaatctccttctgacgctattttttgtcgccatctgtcattgcaatacgcccttgattcattgagaaatggaaaaggcaaagtcaacctgattaaacattactcctccgttgaatccatacagcagcatatccccttagtccgggatgcggagttcagagcattacttcgccatcctcctgcagggagtcgcgttatcgcgagtaaggattttggcttcgctttagatattttcttttgtcgaatgatggcaaacaatgtcagtcatatgtccgcgattttatatatagacaatcatactttgtcagtaaggctacgaataaagcagtcagtgtatggacaattaaattatgttgtgtctgtttacgacccgaacgataccaacgttgccgtcagaggcacccacaggacagcacggcgctttctctcgcttgataagttcatcagttcagctcccgatgctcagacctgggctgataggtatgttcgcaactgtgcaattgctattcttcctctattacctgagggagttccagttgctattttagcgggtatcacgacacgaatgccatttgcccctatacatccatcggcaatgttgttaataatggccacaggccagactcaatagcttattacactattcaaacagttgcccatactccctgaaaaagaaatcattgaaataataactgcgcagaatagcgttggtacacctgctttatttctggctatgatgaacggacaaactgacaacgtaaaaatatttatgcaagaaatccagtcactggtatacaatcatatcattcatgaagataatctggttaaattactgcaaactaaaagtgctaacgaaacacctggactctatatctccatgttgtatggattcgatgaaataatcgatatctttctgaatgcattaaccactccaatagcacaagaacttttaaacaaaaaaatggtgatggatattttagccatgaaaacacgtgatggtgaaccagggttatttgctgcaatggaaaataatcaccctttgtgtgtcacacggttcctctctaaagtttatgggatcgccgttaaatataaactcagcaaaatcaacatcatggacttattaaaaggcgcgacagcacatggaacccctgctttatacatcgccatgagcaagggtaataaagacgtcgtgttatcttatatatcaacactgagtacttttgcaaaaaaatattcttttagtcaacgtcaattattcacactgttggccgctaaaaatcatgaaaacatgtcagctgttcatatagccattcatcataatcattataaaactgtagaaacatattatgctgctattaatgcaatcagccaaagcctgagttttagtgctgatgaactaaaaacgtatttataaccagctatttatgatatttgtatatcgatacataattttatttttttcataaaacgcagaaacagtgatcaggtgtacaacgccacccgacggctgtaataacaaaaaatcccttgatgcctgtcccttttgttacactccgttatcacgcacaagagatatgcaggacactggtatgccgactaaacgctttgataaaaaacactggaagatggtggtggtgctactggcaatctgtggcgctatgttgttgctacgttgggcagcaatgatttggggctgagcagtgacaaacgaagacagccagaccgcataacacggtccggcagataattttacatgctgtagcccagcgataaggttgtccgacgatcggtatgttccggtgcagactctggaggttcagagttccatgtgacgttgtaagccactttcagtccaaaatgttcattaatagcaacatttaatgcgctttcggagttcagcgttgtgtcttccgcgccaaagacggaaacaccctgcgtaaatttagcgttgtcagtcaactgccatgcataagcaccggaggcatagcccagcggctgagtttcactggcattgtcggtatatttgtcgtaacgcacacctggaccgaattcaaagcggaaactgtgtaccgggccattcaaaaactgacgaccataacccgcggtcaacacatcgcgctctcgatagccgttataacggtctgtcagccagcttgcctgaccaaataaatagtcataatcagttaaattaaaacggctacgcccgcccgccgcatatttttctgaagaacgctcatcattagaagaagtattactggcgttcccccacagcgaccaggcagtggtttgtccataccaggtcatggtggtgtcagccgtaagtgaggagcttttcgtattgcctgattgtgcaagatatcctgcgttcagattaccttcgaaaggttttttagcgctggcaggatcgtccatgacagtaaaaacggaatcatcggcagctgcattcagtgacgcaaacatgccccccgccaacataacgatggcaggaactgtcttcaaaagcttcatttatcaagagtccgtacaacaaaaaaagagaccatcgcggtcccggaaactttcttaaggatcaaagattagcgtccctggaaaggtaacgaattataaaaaggcgcgaataacttagcaatgtattcttatttcattttttgaataagcatgtggcgaaaacagatttttatttatatatatttatctgcaaaattttaaataaagctctaataaatcatattgttaatttcttcactttcggctgattcggtgccagactgaaatcagcctataggaggaaatgatggtacgtatctatacgttgacacttgcgccctctctcgatagcgcaacaattaccccgcaaatttatcccgaaggaaaactgcgctgtaccgcaccggtgttcgaacccgggggcggcggcatcaacgtcgcccgcgccattgcccatcttggaggcagtgccacagcgatcttcccggcgggtggcgcgaccggcgaacacctggtttctctgttggcggatgaaaatgtccccgtcgctactgtagaagccaaagactggacccggcagaatttacacgtacatgtggaagcaagcggtgagcagtatcgttttgttatgccaggcgcggcattaaatgaagatgagtttcgccagcttgaagagcaagttctggaaattgaatccggggccatcctggtcataagcggaagcctgccgccaggtgtgaagctggaaaaattaacccaactgatttccgctgcgcaaaaccaagggatccgctgcatcatcgacagttctggcgaagcgttaagtgcagcactggcgattggtaacatcgagttggttaagcctaaccaaaaagaactcagtgcgctggtgaatcgcgaactcacccagccagacgatgtccgcaaagccgcgcaggaaatcgttaatagcggcaaggccaaacgggttgtcgtttcccttggtccacaaggagcgctgggtgttgatagtgaaaactgcattcaggtggtgccaccaccggtgaaaagccagagtaccgttggcgctggtgacagcatggtcggcgcgatgacactgaaactggcagaaaatgcctctcttgaagagatggtccgttttggcgtagctgcggggagtgcagccacactcaatcagggaacacgtctgtgctcccatgacgatacgcaaaaaatttacgcttacctttcccgctaacaaaaacattcccccagcattgggggaatcaccaccaacctgtcggcaacgcgtttctccgactatgctcaaaagtcatgtgataacaaaggggtgaactatggccagtggcgatcttgtccgttatgtcataaccgtcatgttgcatgaggatacattgactgaaattaacgagttgaataattacctgactcgcgacggttttttgctcaccatgacggatgatgagggaaatatccatgagctggggactaacacttttggacttatcagtacccaaagtgaagaagaaattagagaactggtttcggggcttacccaaagtgcaaccggcaaagatcctgaaatcaccatcacgacctgggaggaatggaatagcaacagaaaataaatggtttttgggcaataatcagtctgtggtgtgcgttagctcgtgtttttacaccgcattcttgcgctaaccttatgatctggcagacaacatgggagagacatcatgtggcaggcaatccgtcgtcttttgagcgagcagttaggtgaaggcgaaatcgaactgcgtaatgaactgcctggcggagaagtccatgccgcatggcatttgcgctatgcaggacatgactttttcgtcaaatgtgatgaaagggaactgcttcccggttttaccgccgaagccgaccaactggagttactgtcgcgtagtaaaaccgtcaccgtgcctaaggtttgggcagtaggcgctgaccgtgactacagttttctggtgatggattatctcccacctcgtccgctggatgcgcatagcgcatttattcttggtcagcaaattgcgcgtttacatcaatggagtgaccaaccacaatttggcctcgattttgataactcgctctccacaactccacagcccaacacctggcaacgtcgctggtcaacgttttttgctgaacaacggattggctggcagttggaactggcagcagagaaagggatcgctttcggcaatatcgacgccatcgtcgagcatattcagcagcgtctggcctcgcatcaaccgcagccttctctgttgcacggcgatttatggtccggcaactgtgcgctgggtccggatggcccgtacattttcgaccctgcctgctactggggtgaccgagagtgcgacctggcgatgttaccgctgcatactgaacagccgccacaaatctatgacggctatcagtcagtatccccgctacctgccgatttccttgaacgtcaaccggtttaccaactctacacgctgttaaatcgtgcaagattatttggcggtcagcatttggttattgctcagcagtcattggatagattattagcagcatgatatgggttgaggataatggccgctccgtgcggccttttgattaaataaacccaagcagagaaaagaacacataacctgcagcaatacaaataaccggcaggatatatagtgagaaaaactgcaggaaaatagtatggtgcggaacaacaatacgggactcaatttgttcacgcgttagcccctcttcccctttggctttttccagaatgagttgatcttcaacaccttcccgcaagaagcgcgcctggcgactcatccgggcaccggaatcctgcaacgccagtccgacaaaaatcaggatgaaaatcacccagaacataacgttcacgccaccattaaaattaggggtcggggagttataccagaacagattcaaaaaaggcgtattcgcctgcatcatatcgatcatgacatgagtaaagtcgagcatgaccgcattaatgccttcctggttttcctgccgggtattcataaatttcagcaaagaaatcaatgtagagatcaatgcaggtataaaaatcacccaacccaaaatccttttcaaaacagcaatgcgtccagcttgttgatacgtcatgagttctccttgattaagacgcgtcgtttcacttagtttacctgtagatatctgttttcgcccattctttaaaggcgatatgataggcgcttaatcataagcacggcttaataccttacacataatgctctaaaggagaggttgtaatgtcaaccccgcgtcagattcttgctgcaatttttgatatggatggattacttatcgactcagaacctttatgggatcgagccgaactggatgtgatggcaagcctgggggtggatatctcccgtcgtaacgagctgccggacaccttaggtttacgcatcgatatggtggtcgatctttggtacgcccggcaaccgtggaatgggccaagccgtcaggaagtagtagaacgggttattgcccgtgccatttcactggttgaagagacacgtccattattaccaggcgtgcgcgaagccgttgcgttatgcaaagaacaaggtttattggtgggactggcctccgcgtcaccactacatatgctggaaaaagtgttgaccatgtttgacttacgcgacagtttcgatgccctcgcctcggctgaaaaactgccttacagcaagccgcatccgcaagtatatctcgactgcgcagcaaaactgggcgttgacccactgacctgcgtagcactggaagattcagtaaatggcatgatcgcctctaaagcagcccgcatgcgttccatcgtcgttcctgcgccagaagcgcaaaatgatccacgttttgtattagcaaacgtcaaactctcatcgctgacagaactcaccgcaaaagaccttctcggttaatggccaggggcagtgatctcgctgcccctggttctttatctgaatttgcattcaactgacggattaatcgtcaatttaagagaaagagttacaccgtcaccacttccgtgcactgtataaaaatcctatactgtacgtatcgacagtttagtgagttttatcatgacggcggaaggtcaccttctcttttctattgcttgtgcggtatttgccaaaaatgccgagctgacgcccgtgctggcacagggtgactggtggcatattgtcccttccgcaatcctgacgtgtttgttaccggacatcgatcacccaaagtcgtttcttgggcagcgattaaagtggatatcaaaaccgatcgcccgcgcttttgggcatcgtggttttacccacagtctgctggcggtatttgcgctgctggcaaccttttaccttaaggttcctgaaagctggttcattccggctgatgcgctacaaggaatggtgctgggttatttaagccacatacttgccgatatgctgacacccgccggtgttcccctgctctggccatgtcgctggcgtttccgcttgcctatcctggttccccaaaagggcaaccaactggaacgttttatctgcatggcattatttgtctggtcggtatggatgccccattcattacccgaaaacagcgcggttcgttggtcatcgcaaatgatcaataccttgcagatccagtttcatcggcttattaagcatcaggttgaatactaaaaaggcaaaaatcacctttctggaataagcaattccatttgaatataagagccagctcacagttctgttaatcttgcgccaacactatgactgctacgcagtgatagaaataataagatcaggagaacggggatgaactttccattaattgcgaacatcgtggtgttcgttgtactgctgtttgcgctggctcagacccgccacaaacagtggagtctggcgaaaaaagtgctggtgggtctggtgatgggtgtggtttttggccttgccctgcataccatttatggttctgacagccaggtacttaaagattctgtacagtggtttaacatcattggtaacggctatgttcaactgctgcaaatgatcgttatgccgttagtcttcgcctctattctgagcgcggttgcccgtctgcataacgcatctcagttaggcaaaatcagttttctgaccatcggtacgcttttgtttaccacactgattgcggcgctggtcggtgtgctggtcaccaacctgtttggtttgacggctgaaggtctggttcagggtggtgcagaaactgcacgtctgaacgccatcgaaagtaactatgttggtaaagtctctgacctgagcgttccgcagctggtcttgtcctttatcccgaaaaacccgtttgccgatcttaccggagccaatccgacgtcaattatcagcgtggtaatttttgccacattcctcggcgtagctgcattgaaactgctgaaggatgatgcgccgaaaggtgaacgcgtcttagccgctatcgataccctacaaagctgggtgatgaaactggttcgccttgtcatgcagttgaccccttacggcgttctggctctaatgaccaaagtggttgcaggttctaacttgcaagacatcatcaaactgggaagtttcgttgtcgcgtcctacctcggtctgctgattatgtttgcagtgcatggcattctgctgggcattaatggcgtgagtccgctgaagtacttccgtaaggtatggcctgtgctgacgtttgcctttaccagccgttccagtgctgcgtctatcccactgaatgtggaagcacaaacgcgtcgtctgggcgttcctgaatccatcgccagtttcgccgcctctttcggtgcaaccattggtcagaacggctgcgccggtttgtatccggcaatgctggcggtgatggttgcgcctacggttggcattaacccgctggacccgatgtggattgcgacgctggtcggtattgttaccgttagttccgcaggcgttgccggtgtcggtggtggtgcaactttcgccgcactgattgtgctgcctgcgatgggcctgccagtaaccctggtggcgctgttaatctccgttgaaccgcttatcgacatgggccgtacggcgctaaacgttagtggctcgatgacagctggcacgctgaccagccagtggctgaagcaaaccgataaagccattctggatagcgaagacgacgccgaactggcacaccgttaattcttatgctggcaacggtccgttttgtataggggccgttgctttactttttaaatgttccatcgcggcgatgcatactgactcatatttaaacagatcgtcagcgaaaaaaatgtccaacttatcaatacattcctggctcaatgaatgtgcctgtagtgagaagcttaaaacctcatacccgagacgttttctaagtgaactatctggaatactcataatatcttcaagcacaccacttcccattcccggaagatttagtggattaaaaagaagattgatattaagcattgatattatcgaaggaaactttaggagactctcatttttttgaatcgcagcaaaaatgctcccggcaggatgtatataatttttttcatagtatatagtccttaaataatgaataactaacctattttttatattgatcaaattcgtcatttttcgggtcagaattcacaggtaaaatccatcccaacaaaattctcattaatatctcttatccgaaactcactgccataaagattattaattatcactctatatttaacattgtcctgcagatacgtatcaaaactaagtgctggcgctcctggctttgaggcatcatagttaatgttagacatataggcaatcatacgattgaagttcgactctgctatttcatcgcagtcacattgacccgttgatataaagaaagtgagtgccgccatggtagactcaagcctttctttaaaagagtcgaaagccaggcttttaatatttaaatcaccataattactctgtattaagtttgtagaaaacatctcccgccccatattgttaacaaaattattatctcatttaaatctaagtcacttacaatataagtttaagagcgacgccacaggatgaactatcaaaaatagctcatcatgattagcaaaacttaaccattttaaaataaataaacaattaaagaaaaaagatcacttatttatagcaatagctcgtcaaaggcagctttttgttacaggtggtttgaatgaatgtagcaacgaaatgcagaatttcaggtcatgtaactcccggcaaaaccgggaggtatgtaatccttactcagtcacttccccttcctggcggatctgatttgcccaacgttgggcagattcaggcacagtaaacgccggtgagcgcagaaatgactctcccatcagtacaaacgcaacatatttgccacgcagcatccagacatcacgaaacgaatccatctttatcgcatgttctggcggcgcgggttccgtgcgtgggacatagctaataatctggcggttttgctggcggagcggtttcttcattactggcttcactaaacgcatattaaaaattagaaaaactgtagtttagccgatttagcccctgtacgtcccgctttgcgtgtatttcataacaccgtttccagaatagtctccgaagcgggatctggctggtggtctatagttagagagttttttgaccaaaacagcggccctttcagtaataaattaaggagacgagttcaatgtcgcaacataacgaaaagaacccacatcagcaccagtcaccactacacgattccagcgaagcgaaaccggggatggactcactggcacctgaggacggatctcatcgtccagcggctgaactaacaccgccaggtgcacaacctaccgcccctgggagcctgaaagcccctgatacacgtaacgaaaaacttaattctctggaagacgtacgcaaaggcagtgaaaattatgcgctgaccactaatcagggcgtgcgcatcgccgatgatcaaaactcactgcgtgccggtaaccgtggtccaacgctgctggaagattttattctgcgcgagaaaatcacccactttgaccatgagcgcatcccggaacgtattgttcatgcacgcggatcagcagctcacggttatttccagccatataaaagcttaagcgatatcaccaaagcggatttcctctcagatccgaacaaaatcaccccagtatttgttaggttctctaccgttcagggtggcgctggctctgccgataccgtgcgtgatatccgtggttttgccaccaagttctatactgaagagggtatttttgacctcgttggcaataacacgccaatcttctttatccaggatgcgcataaattccccgattttgttcatgcggtaaaaccagaaccgcactgggcaattccacaagggcaaagtgcccacgatactttctgggattatgtttctctgcaacctgaaactctgcacaacgtgatgtgggcgatgtcggatcgcggcatcccccgcagttaccgcaccatggaaggcttcggtattcacaccttccgcctgattaatgccgaagggaaggcaacgtttgtacgtttccactggaaaccactggcaggtaaagcctcactcgtttgggatgaagcacaaaaactcaccggacgtgacccggacttccaccgccgcgagttgtgggaagccattgaagcaggcgattttccggaatacgaactgggcttccagttgattcctgaagaagatgaattcaagttcgacttcgatcttctcgatccaaccaaactgatcccggaagaactggtgcccgttcagcgtgtcggcaaaatggtgctcaatcgcaatccggataacttctttgccgaaaacgaacaagcagcattccatccaggtcatattgttcctggtctggacttcaccaacgatccgctgttgcagggacgtttgttctcctataccgatacacaaatcagtcgtcttggtgggccgaatttccatgagattccgattaaccgtccgacctgcccttaccacaacttccagcgtgatggcatgcatcgtatggggatcgacactaacccggcgaattacgaaccgaactcgatcaacgataactggccgcgcgaaacaccgccgggaccgaaacgcggcggttttgaatcatatcaggaacgcgtggaaggaaataaagttcgtgagcgcagtccatcgtttggcgaatattattcccatccgcgtctgttctggctaagtcagacgccattcgagcagcgccatattgtcgatggtttcagttttgagttaagcaaagtcgttcgtccgtatattcgtgagcgcgttgttgaccagctggcgcatattgatctcactctggcccaggcggtggcgaaaaatctcggtatcgaactgactgacgaccagctgaatatcaccccacctccggacgtcaacggtctgaaaaaggatccatccttaagtttgtacgccattcctgacggtgatgtgaaaggtcgcgtggtagcgattttacttaatgatgaagtgagatcggcagaccttctggccattctcaaggccctgaaggccaaaggcgttcatgccaaactgctctactcccgaatgggtgaagtgactgcggatgacggtacggtgttgcctatagccgctacctttgccggtgcaccttcgctgacggtcgatgcggtcattgtcccttgcggcaatatcgcggatatcgctgacaacggcgatgccaactactacctgatggaagcctacaaacaccttaaaccgattgcgctggcgggagacgcgcgcaagtttaaagcaacaatcaaggtcgctgaccagggtgaagaagggattgtggaagctgacagcgccgacggtagttttatggatgaactgttaacgctgatggcagcacaccgcgtgtggtcacgcattcctaagattgacaaaattccggcgtaaatatggataaggtcacgtcccctggggagtgaccttaccaccttacttacacattaagataactacccaaccgataaccacgctcagcaattgcatatttcaacgacgctgatgtcagcacttccagctccgttaaccgtgggaaacagtaagcactctgacggatagtattatcgataaacgcaggatgacacatcacctccagcgaaagatcaccccgatggcttgcgtcatccagcacttgcaggaacagtgcctcgctaatctcttcaccataaaacgcgctactgaatccctgagaactgcgcagattagccggtaaatcaccagagttagatagcggctgacggtcgatgcgcaacgcaatcccctcttcagccgcaaacctggcaacaatcgggaaaatctgcgggaacatatgcacatgatgatggctatcaagatgcgtaggtttgcgtccaaatagctcaatgaaacgcaaatactgactggcaagctcctgagtaatttcttccagcggtaaagcatcttcttctgccaactgccagatccattttcccagcacaccatcgcgggttaaccccggcatagctgtcagtggcttgcccatagtaaggacaaagtgcatccctatggccagactcggttcatcacgactcaactgcaccgcatggtcaatagcctgcccattcaccagcgccgtcgtcgatgtgacaatcccattgcgacaggcctcgataatgccgtagttctgacctttgcttaagccaaaatcatcggcattaacaatcagtaagcgttccataatcagcctcggttaatgtgcttttttaagctctgcgatgcagtcggcaaaatttggcagccatttctcgtgcgccagaatcatctcgcgtgccagcagctcagcatcgcgatcggaatgcaccaacggactaaggtttagcgccagtaacacatcgttaaattctccgctaagtgcggcgttgctggcagcaatctcgaagcctttaatggtgtgaatcagccccatcactttatcatcgaaatgcgtaatgcgcggatgtggcgtcgcgccatcgcgccccagcttacaggtcatttctaccgcccagtctgccggaatattatcaatatgcccatgatgcgggatattaacgtaatgttcagcttgcttgtcgttgtagatagcgttgatcacttcgcacgctgcatcagagtaataagccccaccgcgctgttccagttctttcggcttaactttcaactccggatttttatacagctcaaaaagttgtttctcgactttctgtactacctgtgctcgtgcgccgcctttgtagtattcgcccatttcaatagccagcatctctttctgcttgaagtaatacagcagataagaacatggcagcagatttaacgaacgaattaagccctcactaaatggcagatcgaaaatattttttacagaggacgcttttaactgccctgacgccacaccatcaagcaattcggcaaagcgcgacttgccatttaccagcacatccttaatgaacaccatatggttgaggccgaacagatcgatagataaatcatcgctgtctttcagcatcagaacatcgcgaataaacatcttcatgccgatcggaatattacacacgccgataaagcgtttaaatccggtatgacgataaacggcttcagtgaccattcccgccgggttagtgaagttaatcacccatgcattcggacaaagttcttcgacatcttttacgatgtcaaaaatcaccggaatggtacgcagacctttaaacagaccgcccgcgccgttggtttcctgaccaagataaccatgacttaatggaatacgttcatccagttcgcgcgccggtaattggcctacgcgcagttgggtagtaacgaaatcagcatctttcaatgcttcgcggcgatccagcgttttataaagcttcatcgggacgccagcgttatcaatcatccgttggcagagttcaaaaatgatatccagtttctctttaccatcttcgacatccaccagccataattcgctgaccggcaattcgtgataacgcttaataaatccttccagtaactccggggtatagctgctcccgccaccaatagtgacgacttttaatttctggctcataatttctcccttcagtacagaatactgatatctggcatatctgccccccggacataaataatccagcaacaggacagatatgtgaattgtcaggtataacgacttactgattaaattcagtcaatttcttacgatagctcttaggcgtaaaggacgttaatttcttaaacgttttaataaacaaactcgggctactataaccggcctcaaacgcaatatccgtcacggaatagttggtcatttccagttgttttttggcaaaattaatacggatctcattaataatctgcattggtgttttgccataatatcgttgagtcgctcgcgtcaaatattcctgtgatttggctgacaacgtcaccatattctccagcgccgattcactaaactgctctttatcatgcatcttttctaccgtacttttcagccactgcggtacatcatcaatcacctgttcttcgcggtaatgacgtaaacggttaatgacataaaaagtaaccatctcaacaaactcttccagccctgtttcgcggaaattcaatgaagaaatcactgtttccacataggtgagaaaagcgttattggtccggtatacctgcgaagcgacaaagcaataaggcaacaacggcaggtaatgctgctcaaaaaagcgtttactgatcccaacgttcaatatacgcgtggcaccaaactcataaaaactttgatggtgcgaacctaacggaataaaaacaaaatcgccccgttccagtaacacgcgcttaccgttaatctcctggaaataacgcccggttaataccagagtaaattcataatagtcgtgctgatgcagcccgctgatactctcagttttgttatagataaacacatggaagtttttgccattaaacaactgctgttctcgggcagtggcaatttccggcgcgttaatcactggctgcatcatcgactccttatgccttcagtttttcatgaagctcaattaattcagtaatcagttcacgcgcaagcatggacgtcattaaatgatcctgagcgtggaccagcaccagactcactttcatcttaccttcgcccgcatcgccttcaatcagtttcgtctgtaccagatgcgcttcattcaatgccatccgtgactgatctatcatggcttttgctgcagcaaaatcgccctgcttcgcctgtttcagtgccgcatacgccaggctgcgcgcttgtccggagttgatgataagccccatcaccacttcttccagctcttcagcttccgtttgcgtatcgggaatgttatcgagatccatcatacatcgttcctctctattcttaccggcacgattacccgtaccggcatcgattaaaatttcagggcgttagcgatatcttcttcgctctcttctttatcaatcgcgttttgtgctttgttagccaccacaacaaagggcagataaattaacgttgcgataccaaggttgaagagtgcgaccagcaatgcggcgacgctaccgttggtgttaaagaaggctcccagaccggttggcatggtccacggtgcaatattggtcaccggaggaatgatgcccatgtagtacgctgcgagggtgattgccgccagaatcggttgtaccagtacaaacgggataaacatcaccgggttcatgataattggcagaccaaacagaatcggttcgttaatctggaagatgccggacggcagcgccagttttgctacctgacgataatcagcacggcgagaggcgataaagatagccaggatcaggcctaaagtcgcaccactgcccccaaggaaaataaaggagtccagcatcggcttggcccagatatggaaggtcttaccggctgccagcgccgcttcgacggaaccatattgctgataggtcgcgatattttccagcgcccacggcgtcataatgccgttgtccagtgcggtcagcgccagcgcgccatgaataccgaagaaccagagcagtggaacaaagatcacataggcccagcccaccacgctacccaacgatgccagtggggttgagatggtatccataatgatctgatggaagttggtgccccaggtattcaacgcccaggcaataatccccatcacggaaagaataataaagccgggaattaatgccgagaaggaacgcgatactgaagcaggtacgctgtcgggcagtttaatgacccaattgcggcggacaataaaggtaaacatttctgccaccaccaggccaataataatcccggagatgatattcgccccacctaaccagtttgcgccaaccgcataggcctcaccgacactatatggggtgacggtcataaatgctgcaacggataacaaccccgccgccagcgcatcgactttacgctcttctgccagcgccatgccaataaagaacggtgccattaaagacattatccctaatgttccgttatatacgttgccgccaatacctttcaggccattaagtgtttcaatggttgaggcgtcgaggcgaatacctaaggaataaaaaaacgacccctccccaaagcttagaaaaacgttgttaattaatacaaacatggcccccgcaagggttaacggcattaagcgaataaagccatttttgattgcattaacgtgtggctgctttcctattttaactgcaaaagggaggagtaccttttcaagcgatgcaataacattactcatagaaaaatacccttaaaaaccgcaatttaaatattgcggtattgatttatgaaataactctttgacgggaaaatttaaaataaattaatttgctgcggcttttttaatcgctgcaaccgcagccttaagcacgcctaaaccatcgactttgccataaagcagcgagtcaattacttcaaccggtttgttgggtaacaaacgctggatttcgggcaacatataagcaatctgcggccctaataacacgacatcggcattctgacctttttcaccagccagtgtttccggaaatgcttcaataatgaccggaacttcatatttttctgcctgtgcgcgcatttttgataccagtaaagaggtagacatgcccgcagaacaaaacagataaatgtgtttcttttccataaaactgccctcatcgacgattatctgtcagccagacactccgcaagccttaacctgcttccatgctctgggtaacttgcgaaaccaacatgactttttttgtggctgaaaggagtatacggtatagacctgagcaatagtatttctttgaccttataaattgtctctccttgacctgcggttatgaccctcttcacatttcgggcaaataattcgcgaagataattaagaactcaggccaaaaaaaaccggcacaatggccggtttccgttgttactcaagctttcagacgaattgattacttcgcagcctgtggatcagtgtcgtattcagcacaggtctgataaccggagttgatgacatgtccggtatcatctaacgcgacaaagtaggtttctgctttaccatcacgttgacccaggatgtaggtctggcaagtaccacgagcatggatcatgctcacttcagacgaaggtttacccgcaatttgtgcaacctgcgcccggctcatgccttttttgacgtctttcaccacaggctgtacaaactggtctttagtacgatcataagccgtacaacccgccagcatggttaataccgccgctgcactcagaattcctgccatattcttgttcatattccgtcctcttgtttatcagcgtgttagataagcctggaatacattgggcgctttttcaagcccgtgaacgaaacggctccgctttcagaggattcctgtatgacgttttaaccaccattcagcccgctgtcgcttgtcgtttcagtagcaacgggttagctttaaggaagttttgtcttttctgtctggaggggttcaatgacattgcaacaacaaataataaaggcgctgggcgcaaaaccgcagattaatgctgaagaggaaattcgtcgtagtgtcgattttctgaaaagctacctgcaaacttatccgttcattaaatcactggtgctcgggatcagcggcggtcaggactccacgcttgccggaaagctgtgccagatggcgattaatgagctgcgccaggaaactggcaacgaatcactgcaatttattgccgtacgcctgccctatggtgttcaggccgacgaacaagattgccaggatgccattgcctttattcaaccggatcgcgtattaaccgttaatatcaagggcgcggtattggctagcgagcaggcattgcgggaagcaggcattgaactgagcgattttgtccgtggcaatgaaaaagcgcgtgagcggatgaaagcacaatatagcattgcgggtatgaccagcggtgtcgtggtgggcaccgatcatgcagcagaagccattaccggattcttcactaaatatggtgacggcggtacggacattaatccgctgtatcgtctcaacaaacgtcagggtaaacagttactggcggcattaggttgcccggaacacctttataagaaagcgccaacggccgatctggaagatgatcgcccttctctgccagatgaagtggcactcggcgtgacctatgacaatatcgacgactatctggaagggaaaaacgtacctgaacaggtcgccagaacaatagagaactggtatctgaaaaccgaacataaacgccgtccgccaattaccgttttcgatgatttctggaaaaagtaataatttgcacctattggtttgtgcgaaaaagagtaatttgttcacgccggatgcggcgtgaacgccttattcgacctacaaaactatgcaaattcaatacattgcaggagtcgaataggcctgacaggcgtagcacgtcagacggtgtaacctttgtcatcaacccgcctcttttttaatcgcctcccgcctgttacactggatagataaccagcattcggagtcaacagtggtacggcgtttaacttctccgcggctcgaatttgaagctgcggcaatttatgaatatcccgaacatttacgttcattccttaatgacttacccacccgaccaggggtgtatctgtttcatggcgaaagtgacaccatgccgctctatatcggcaaaagcgttaatatccgcagtcgggtgctttctcatttacgcaccccggatgaagccgccatgctacggcaatcccggcgaattagctggatctgcaccgcaggcgaaatcggcgctctgctccttgaagcgcgattaatcaaagaacaacagccgctgtttaataaacggttgcgccgcaatcgccagctctgtgccctgcaattaaatgaaaagcgcgtcgatgtggtgtatgccaaagaggtggatttttcacgagcccccaacctgtttggcctgtttgccaataggcgcgcagctttgcaagcattgcagagcatcgctgatgaacaaaaactttgttatggcctgttgggactggaaccgttaagtcgcggtcgtgcatgttttcgttcagcgctaaaacgttgcgccggagcatgctgcggtaaagagagccatgaggaacatgcgctacgcttgcgccagtctctggagcgtttgcgggtggtgtgttggccttggcaaggtgcggtggcactgaaagaacagcacccggaaatgactcaatatcatattattcaaaactggctgtggctgggggcggttaattcgctggaagaagcgacaacgttaattcggacacccgccgggtttgatcacgacggttataaaattctttgtaagccgctgctttccggtaactatgaaattactgaacttgatccggcgaatgaccagcgagccagttgatttcactgaacaacagtttaccttgcggttgtaaaagccgcagggtgtgcctgccatcgaaccagcacgcgccctggtcggtagtgagcaatttatcgcccagttgccacgccccgttaatcacaaacaccaccccgccgcatgagccaaaggtagtaaacgtacgttcggcaattctgactttcgccttacagacatccaggcgtgtcatgatgttgaaatccatcgacatctgccctgccgtcagtttcgcttttaccacctggtccgctgcaaaggcaaaaggctgtaacggttttaaggtatggttaaagcggtctgcgctttcaaggagcatctcgccgccttccagcaacgtcactatcctttccatgccgggaaacaaagaaaactccccattcgccgcgatggatgcaatgctggcacgccagtaaaaatcacgttttgccggtgggaaagtgcaaatttcgcgcgtttcaccggcagcatttcgccacagattcaccgacattttacgcatatcaaagtattccatactcgctcccggcccgttcttttcattgttatcgttcaggtaaccgtggatggttatcggcaactcgggtgatttacgttagtggtgatcaggcttttttacaactgtttgagaagagaaaagaaaaccgccgatcctgtccaccgcattactgcaaggtagtggacaagaccggcggtcttaagttttttggctgaaagattattcagcagttgcaggcattttaccttttgccgctggacgttctgtcagacgcttctcaaaattagcattaaattgctttttctgttccggcgtcaggatgttgtaaattttgttctgggtttccatgtgcgccagcatgttagctttgcgctgttcttccatttttgcgatctgcgcttcagcttttgctttatcgaaggtatcgctggcaatgatgtcatgcattgcgcggcgttcttccagcggcggacgtttcatctggtcacgctggcctttcatgatttcgcggatctgctgtttctgcgcgtcggtcaggttcaggtctttgaacatcatgtcctgatgcggaccgaacttgcctttgtggtgcatcatcggcttcgcgtcagccggtgctgcggtagtggtgtctgcggcatgggtcaggttagccgcgccaagagccagggtagaggcaacaaacagtgcagttaatttacgcatattctatatccttcctttcagttatttattacggctttcttaagtagcgtgccgtgttgacgagattaactttactgactttagcgtcaattaatcagagcaacggtaaaacaatgaaagtgtaaaaaacacttttgcgccaattatggagaaaaaaagaaaatttgatggagagtgatgagagaatattacaacacgatgattttgcagagattatgaagaactataccggatgactggtgataaataaagcaaataaccaggattaatctgtattaatttataagaaagcaacttaatacccgcagaatgatttctgcgggtaagtattagcttattttttcgagcattaatcccgcgcgtaatcccaacgctaccaacggattagggaataacacatactctacatcatgggttacggtaaaacgttcctctccgtcctgcgccagcaatgttcctttctcaaacggcataaaattcagcgtgtcacttgccatatgcatttcgaaggacggcgagtggcgagtaatttgcgaaaccacccgataacggagcggcggtgttctcacgataccgacactctcaccagatagcagcgcagcaattgcgctggcagttactgcaaactggcgaagatcgttttgcccaaagggcaacgctttgccaagttccagcgtacaggccagcgcgccaaaatgtctggcgctgaaatgggtaaacgtaccaccaggttcctgatggaacaccagcgcctccagccccgccgcacccagccacgtcagaaatttctcgtcccagggaatgtcgcgttgcggtaatacaccgaactgcggatgcaaggagccacgaattgcggtatgtagatcaaggtgccagcgcacagattctttgcccaggtcataaaaatcttccaggcactgttccagttcgcgcgcccgacaggtttctccgctttcagcaaatagctgccaacgaccgccaaacattcgattcatatcgctatggcaataacgtttccctttcttcagcgcaggaggattcccgaggatcaccagcaaccgccaacgtaacgggatctcgccgtgagatatcgcgccaagcaacgcgtccagcatctccacaggtgccgtctcattaccgtgtattcccgctgaaatcaccagtgcgccttgcggtggcgttaatggcgtcagttccagcacaccatcgcccagccagcgccagcgaacgccgttgatttctcgctcggtgataaccggttttttacccgttaaggtcagagcaagaaaattatccattgccccctccctcgcgctggaacggataaaccgaaccgagattcagtaattggctcaatacatccagtgcttcccgccctccgcgcagcaattgcgggtcggccagatcggcagcagtaaggcgatcgcggtagtaacgatccacccagtcattgagcgcattaaacagcgtatcgttcatcatcaccgccggattcaccgcccggcgttcttcttctgtcaataccacccgcaaccgcaggcacgccgggccgccgccattcgccatgctttcacgtaaatcaaagacttttagttcgctaatcgggttgtcagcggcaaggagttcattgagataaccccatactccggcgtgttcccgacactcctgaggcagcaccaacatcatggaaccatcatcgcggctcaacagttggctgttaaacagataggtagacaccgcatccgacacggaaacctgagttgccggaacttctatcgccataaaaccgttcacccgcgcacgcaggtttgccagtaactgtgactggcgagcgaacgcctgttggtggcaaaacagcacctggcggttactcacggcaatcacgtcattatgaaaaacgccctggtcgataacgtccgggttttgctgggcgaaaatcacctgttggggattcacctgattcagccttgccaccgcctcgctggcttcgcgagtctgtcgcgccggataacgggaaggccgggtatcattgccttcttctcgcccgtagacaaaaagttgcatacccggctcaccgtaatgaccgccgagacgattgtggtttgccgccccctcatcaccgagcaacgctacctgcggcaacgccgaatgaacgctaaatttctcttcgtcgttaaaaatcgcttttaaaagtgattcggtgacgtgcgcttccagcgagcggtgaaatttattgttcaggttggcaacggtgagatgcactttgccatccagcgtatcggcagatggcgcgatcgttgccgcattggctacccacattggcgaagcggaactgacgctggaaagccagtgcggtgcctggcgtgcaactttttccagtacctgctcatcgctaccactgaatcccaactgacgcagcaccggaataaacggacgctcgtgcggcgggatcacggcctgggggaatcccgcatcggcaagggctttcattttcagtaagccctgttttgccgcctgtcgtgggttagacacctgaaaacggtgacgggtagaggcttcattaccaaacgacaggccagcgtaatgatgcgtcagccctaccagcccgtcgaaattaacttcccaggcgttcatcgcaccacctcatcggaaaaatccagcccggggttaagcgttgcgggcaaagttaacgagtccgactccaggctcgccataggccatgcgcagtaatctgcggcataccaggcgctggggcgatggttaccggatgcaccaatgccgccgaatggcgcggtactggcagcaccagtaagcggtttgttccagttaacaatccccgcccgcgcctccagcaacagttgatcgaatttttcccgctcgggggaaaccagaccgcaagagagtccgaagcgagtgttattcgccattagaatcgcttcctcgaaagaatcataacgccagacgcgcaataacggtccgaacacctcttcatctggtacgccagcaacgcctgtcatttcaatgatccccggcgtcagcaacgatgtctctgattgtaataagcgcggcgcaagcagggttcgtccgcccatcgcttccagttgctgccaggcagtaaccacctgctgtgcggcctgttcagaaatcagcccgccaataaacggctgcggttcgtcatcccagttgcccggcgttaatcgctggctgacggcaaccagacgagcaagaaacgcatcgccctgcgctccgcttttgagcaataaacggcgggcgcaggtgcagcgttgcccggctgtgacaaacgccgactgaatggtcagatggacagccgcgtcgatatccgccacctcatcgataattagcggattattaccgcccatctcaagggcgagaattttctccggctgaccggagagctggcgatgcagctggtagccggtattggcgctaccggtaaacagcaaaccgtcgagatcctccagcgcactcagcgcctgacccgtttcacgcccgccctgcaccaggttcagtacgcccggcggcaagccagcctgctgccataaacgcattaccgcttcgccactccacggtgtcagttcgctgggtttaaagataatggtgttacctgccagcaatgccggaacgatatgtccgttcggcaaatgaccagggaaattatacggcccaaacaccgccagcacgccgtgcgggcgatgtcgcaggctcgccgcaccgtccggcatttcactacgctgctcgccggtacgaacgtgatacgccttaattgatatcgcgattttattgatcatcgccgtcacttcggttgccgcttcccagcgcggcttacccgtttctctggcaataatcgcggttaattcgcctttattcctttccagcaatccggcaaagcgttcgacaacgacctgacgttcagccaatgagagccgcgcccagcgcggaaacgccgcacgggctgcccgacaagcctgttcgacctgagcggcatcggcatcattgccttgccataacacctcgcccgataccggattacgcttcacacgcgatgcgccctggcccgttatccagtcaccgttaatccataaagtcatgctgttttctcctctgcgcacaggcgcaccagacgaacgcgatcccctgcgtggcatttgagggcatccagttgttcggcggttaaaatcaaacgctcggttgccggatcggtacgcgccagcaccacgcggaaatggtgataattttcattggcgaccaggcaggccggaaaatcgccctgcgcaggctgcccttctgccacttccaccagccgacttttacgaatggcgcgcacgcggtcgatgtcacactcaagcgttggcccgccgtcgaagatgtcgatatagttgcggtaacgaaaaccttctttctccagcaccgcgcgggcaggcgcggtttgcggatgtacctgaccgatgacgtcctgggcttcctgggataaaaagtgggtatagatcggatgtttcggcatcagttctgcaataaatgccttttgcccggtgccgcagagaaaatcggcgcggctaaaatccatcgaaaagaagcgtttaccgaggctttgccagaacggtgaatagccgtgttcgtcaatcaccccgcgcatttcagcaaccactttgtcattaaacttgtcgcgaaaagccgccataaacataaagcgcgatttcgacagcaaatagccgttgccctctttgcgccagtccgggtcgagaaacagcgtgcacagctcgctgctgccggtgtgatcgttactaagaaacagcgtcggcaatgcgttatagacattcagctcttttgaggcgtgaaccaacgtgccgacgcgatagttgtaccagggatcgttcagcccaaccgccacctcaatggcgcaaatccccgccacagtgcctgtctcgctatcttccagcacgaacacatagccctgctcgcttttgggcagttcgccttgccaggttttgattgccctttcgatacgcgccgaaagcgtggcttcattggcgggaagcgacgtcaggccgccgcccgttttgctggcaagttgcattagcgccgagacatctgagcgctcaacgggacggatgaccatcatgatgaacctcggctaacaaagtgttcgcaagcagctgcaaagcgatccagtccggtcgtcacctcttcttcgctgacattgagcgcaggcgcaaaacgcaccacattaccgccagcaatcagcaccatcacgcccgctttcgccgcctcctgagagatctgtttcgcttgcccggcgtaatccgcattcagcacacagccaatcaaaagacctaagccgcgaacttcactgaacaaaccgtagcggtgattaagggtattaagacgctcaacaaaccagtcgtgacgctgcttaacgccattaagcatctctggtgtgttgatgagctccagcactttgcccgccaccgccgaggccagcggattgccgccataggtggtgccatgagtgccaacggtcatcacgcgggcgcactcttcggttgctaacaacgcaccgactgggaaaccgccgcccagcgctttggcggtggttaacagatcgggcgtcacgccgtagtgcatataggcatacagctcaccagtgcgcccgacgccggtttgtacctcatcaaaaatcagcaaggcattgtggcggtcacacaattcacgcagaccttgtaaaaatgcgttgctggctggcaccacaccgccttccccctggatgggttcgacaatcaccgcacaggtggcgtcgtcaatcagcgcgctggcagagttaatatcgttatatgcagcatgacgaatatccggtggcagtggcgcaaaatcctgtgaataggctggctgcccacccgcactgacagtaaacagcgtgcgaccatgaaacgcatttttgaacgccacgatgccgctcttatggctgccgtagcggtcatgagcgaatttacgcgccagttttagcgccgcttcgttggcttccgcaccggagttacaaaagaagacgcgatcggcaaacgtggcgtcgatcaattttttcgccagtcgcagtaccggctcgttggtgtaaccgttgccggtatgccagaacttactcgcctgttcgttcagcgcttcacgcagttccggatgcgcatggcccagcgcgttcaccgcaatgccacccgcgaagtcgatatactctttcccctgctgatcccacaagcgcgaaccttcgccacgtaccggtataaagggtgccggagcgtaaacaggtatcatccattcattaaagttttcacgcgtaattggctgagacatagcgacctctacagtaaataattcgttatttatatgttaacaataagtaatgtttgcgctgtaaatgtagattgcagggttcgtgccagccagtgataaaagtgcataaacggcggaggctaactggaaatcaaggagttataaccaaaccatatgcatttaaagtgcatataaagtgaatacgtttgcgatgtgggtgaataaaaagaataaaaaacgcaatgttatgcagaagtaaaatataattctggaattgtgatcattgacgaaatttactggaaattactgcgccattctgacgcagcgcgcaccaaaagcgggcattttttgcgccatcgttgacatcattaacaaccatcgatcaaatcacttaacaacaggcggtaagcaacgcgaaattctgctaccatccacgcactctttatctgaataaatggcagcgactatgaaatttgtctcttttaatatcaacggcctgcgcgccagacctcaccagcttgaagccatcgtcgaaaagcaccaaccggatgtgattggcctgcaggagacaaaagttcatgacgatatgtttccgctcgaagaggtggcgaagctcggctacaacgtgttttatcacgggcagaaaggccattatggcgtggcgctgctgaccaaagagacgccgattgccgtgcgtcgcggttttcccggtgacgacgaagaagcgcagcggcgaattattatggcggaaatcccctcgccgctgggcaatgtcaccgtgatcaacggttacttcccgcagggtgaaagccgcgaccatccgataaaattcccggcaaaggcgcagttttatcagaatctgcaaaactatctggaaaccgaactcaaacgtgataatccggtactgattatgggcgatatgaatatcagccctacagatctggatatcggcattggcgaagaaaaccgtaagcgctggctgcgtaccggtaaatgctctttcctgccggaagagcgcgaatggatggacaggctgatgagctgggggttggtcgataccttccgccatgcgaatccacaaacagcagatcgtttctcatggtttgattaccgctcaaaaggttttgacgataaccgtggtctgcgcatcgacctgctgctcgccagccaaccgctggcagaatgttgtgtagaaaccggcatcgactatgaaattcgcagcatggaaaaaccgtccgatcacgcccccgtctgggcgaccttccgccgctaatttagcagctctcctggctcaaactgggtcaggagaattaaccttgagaaaaatcaacaaactgtcagtaatgatttgttgcctgccgtcctttgttataccgtcactgcgtttttagttgtctgaccacttctctattatcaagtttgatataggaaactccacgatgaacgctgagcgtaaatttcttttggcctgtcttatttttgcgctggtcatttacgctatccacactttcggtttattcgatctgctcaccgatttaccccacttacagacactcatccgccagagcggattgttcggttatagcctctatattctgttattcattattgccactctctttctgttaccaggaagcatactggtgatcgctggaggaatagtttttggcccgctcttagggacactactctcattaattgccgccacgctcgcctcctcgtgctcattcctgctggcgcgctggctgggacgtgatttactgctgaaatacgttggtcatagccatacctttcaggccattgaaaaaggcattgcgcgtaacggtattgattttcttattctgacccgcttaatcccgttgtttccttacaatattcaaaattacgcttacggattaaccacaatcaccttctggccttatacccttatttcggcactcacgaccctgcccggtattgttatttataccgtgatggcaagcgatctcgccaatgaaggcattacgctgcgctttattttacaactctgtctggcgggcctggcgctgtttattctcgtccagctcgcaaaactctacgcccgacacaaacatgtggatctgtctgcttcgcgccgcagcccacttactcacccaaaaaatgaaggatagaacgatgtcgcaacattattcagtgtcatggaaaaaaggactggctgcactctgcttactggctgttgccgggcttagcggctgcgatcaaaaagagaatgcggcggcaaaagtggaatacgacggactttcgaacagccaaccgctgcgtgtcgatgccaataaccatacggtaaccatgctggtgcaaattaatggtcgtttcctcaccgatgacactcgtcacggtattgtgtttaaagatggctccaacggacataaatcgctgtttatgggttatgcaaccccgaaagcattttatgaagccctgaaagaggcaggtggtacgccgggcgaaaacatgacgatggataataaagaaacgactcatgtcacaggtagcaaactggatatttcggtcaactggcaaggggcggcaaaagcgtattccttcgatgaagtgattgttgacagtaatggcaagaaactggacatgcgctttggcggtaatttaacggcagcagaagagaagaaaacgggttgcctggtgtgtctggatagctgcccggtcggcatcgtcagcaatgcaacatacacttatggtgcggtggaaaaacgcggcgaagtgaaattcaaaggcaatgcctcagttctcccggcggataacacgctggcaacggttacctttaaaatcaccgaataaagcaggataaaggatgatgaagatgcaatcgcgtaaaatctggtactaccgtataaccctcatcatcctgttgttcgctatgctgctggcatgggcgctgcttcccggcgtccatgagtttatcaatcgcagcgttgcggcgtttgccgccgtggaccaacagggtatagaacactttattcagtcatacggcgcactggcggcagttgtctcgttcttgttgatgattttacaggccattgctgcaccgctacctgcgtttttgatcacctttgccaatgcgtcgctatttggcgcgttctggggcggcttgctgtcgtggaccagttcgatggccggcgcggcgctgtgctttttatcgccagagtgatgggccgcgaagtggtggaaaaattaaccggcaaaaccgtacttgacagtatggacggctttttcactcgctacggcaaacacaccatcctggtctgtcggttattgccttttgtccctttcgatccaatcagctatgctgccggtttgacttcaatacgttttcgctcgttttttatcgccaccgggcttggtcagttacccgcgaccatcgtctactcctgggcgggtagcatgttaacgggcggcactttctggtttgtcaccgggctgtttattctgtttgccctgaccgtggtgatttttatggcgaagaaaatatggcttgagcgccagaagaggaatgcctgatgggtttaccgccgcttagcaaaattcctttcattttacgtccgcaggcgtggctgcatcgtcgccattacggcgaggtgctaagccccattcgctggtgggggcggatcccgtttatcttttatctggtgtcgatgtttgttggctggctggagcgcaaacgctcaccgctcgatccggtagtgcgatcgcttgtcagcgcgcgtatcgcgcaaatgtgcctgtgtgagttttgcgtggatatcaccagtatgaaagtcgccgagcgcaccggcagcaccgataaattgctggcggtagctgactggcgacaaagcccgctctttagcgatgaagaacggctggcgctggagtacgccgaagccgcaagcgttacgccgccaacggtcgatgatgccctgcgcacccgactggctgcgcattttgacgctcaggcgctcaccgaactgacggcattgatcggcctgcaaaacctgtcagcccgttttaattctgccatggacattcccgctcaggggctgtgccgtattccggaaaaacgttcttaaggagagatgatgcgccattgtgggtggttgctgggattgttatcgctgttttctctggcaacacatgccagtgactggcaggaaattaaaaatgaggccaaagggcaaaccgtctggtttaacgcctggggcggcgataccgcaattaaccgctatctcgactgggttagcggcgagatgaaaacccattacgctataaacctgaagattgtccgtctggcggatgccgcagacgcggtgaagcgcattcagaccgaagctgctgccggacgtaaaacgggcggctcggtggatctgctctgggtgaacggcgaaaacttccgcaccttaaaagaggccaagttattacaaacgggctgggcggagactctgcccaactggcgctatgtcgacacacagctgccggtgcaggaagatttttcagtgcctacagaaggggctgaatcgccctgggggggcgcacaactgacatttatcgcccgccgcgatgttacgccacagccaccacaaacgccgcaagccttactggagtttgctaaagtcaatcccggcacggttacctatccgcgcccaccggactttaccggcacggcgtttcttgaacagttgctgattatgctgacgcccgatcccgccgcattaaaagaagcgccggacgatgcgactttcgcccgtgtcactgctcccttgtggcaatatcttgatgcgctgcatccgtatttgtggcgcgaaggaaaggatttcccgccttcgcccgcgcggatggatgctctgctgaaagccggcacattgcgcctgtcgctgacctttaaccctgctcatgcccagcaaaaaatcgccagcggcgatttgcctgcaagcagttacagttttggttttaacgaggggatgattggcaacgtgcatttcgtcaccattcctgctaacgcgaatgccagtgctgcggcgaaggtggttgccaatttcctgctctcacccgatgcgcaactgcgtaaagcagatcccgctgtctggggcgatccttctgttctcgatccgcaaaaactgcctgacgagcagcgcgaaatattgcaatcaagaatgccgcaggatctgccgccggtactggctgaaccgcacgcaggatgggtgaatgcactggaacaagaatggttacgccgttacggtacgcattaatctttttgctgtgggcgatggtggcggtgatttatgcaccgctgatcccggcagctctcacgctgatatcgcctgcgttgtcgttgacacactggcaggcgttatttgccgatccacagttaccgcatgcattactggcaacgctggtgtcgacaaccatcgcggcggtcggggcattgttgattgccctgctggtgattgtggcgctatggcctgggccgaaatggcagcgtatgtgcgcccgtcggccgtggctgctcgccattccccatgtggcttttgccaccagcgccctgctgctctttgctgacggagggctgctatatgactatttcccgtatttcactccgccaatggaccgatttggcatcggtctgggcctcacccttgcagtgaaagaaagcgcatttctgctgtggatcttagcggcagtattgagcgaaaaacggctgttgcagcaggtcattgtgctggattcgctgggctacagccgctggcaatgcctgaactggctgctgttgccctccgtcgcgcctgcgctggcaatggcgatgctggcgattgttgcctggtcgctttcggtcgtggatgtggcgattattcttgggccaggtaatccaccgacgctggcagtaattagctggcagtggttaactcagggcgacgcggatcaacaaacgaaaggcgcactcgccagtctgctgctgatgctgttactcgccgcctacgttttgctgagctatctgctatggcgcagctggcggcgtactattccccgcgtagatggcgttcgtaagcctgccacacctttattaccaggcactacgctggcgagttttttacccttaaccggtgtgctgtgtgtggttctgctggcgatcctcgcggatcagtcgacgatcaatagtgaagcactcatcaacagtctgacaatggggctggtagcaacattcatcgctttgctcctgttactgcagtggctggaatgggggccacagcgtcgccagttgtggctatggttgcccattctattgcccgctctgccactggtggcgggccagtacacgctggcgctatggctgaacctggatagaagctggacggcggtggtctgggggcatctgctgtgggtaatgccgtggatgctgtttatcctgcaacccgcctggcagcgcattgattcacggttaattttgattgcgcaaacactgagctggtcgcgggccaaaatcttcttttacgtgaaatgtccgcttatgctacgccctacgctgattgccttcgcggtgggattttcagtcagtattgcgcagtatatgccgacgctgtggctgggcgcggggcgttttccgacgctcaccactgaggcggtggcattaagcagcggcggcagcaatggtattttcgccgcccaggctttatggcaactgctattaccgcttattatttttgccctgaccgcgttagtcgcaaaatgggtaggttatgtcagacaaggactccgctaatgctctgcgtgaaaaatgtttcgctacgtttaccagaaagccgcttgctgacaaacgttaactttacggtggataaaggtgacattgtcacgttaatggggccgtctggctgtggaaaatccactctgttttcatggatgattggtgcactggctggacagttttcttgtacaggtgagctatggctcaatgagcaacggattgacatgctacccaccgcacagcgtcagattggcattcttttccaggatgcactgttatttgaccagttcagcgtcgggcaaaatttactgctggcgctaccgtcgacgctcaaggggactgccaggcgcaatgccgtgaaagacgcgcttgatcgagcgggactggctgaaacttatcaccaggaccctgcgacattatcaggcggtcagcgagcgcgggtggccctgctgcgcgcccttctcgctcagccaaaagcgttactcctggatgagccattcagccgtcttgatgtggctctgcgcgataattttcgccagtgggtgttcagcgaagttcgcgaactggcgatccccgtcgttcaggtaacgcacgatctccaggatgttcctgctgatagttctgttctggatatggagcagtggtcagaaaattacaacaaactgcgataacgcaaagtttttctcaatgcgtcagttcagaatggcgcactcaaaactacaatgtcgggattttcgatgaaacgtgtttctcaaatgaccgcgctggcaatggctttagggctggcttgcgcttcttcgtgggccgctgaactggcgaagcctcttacacttgaccagcttcaacaacaaaatggcaaagcgatagatactcgccccagcgcgttttataacggctggccacaaaccttaaatggcccttctggtcatgaacctgccgccttaaacctctctgccagctggctcgacaaaatgagcaccgaacagctcaacgcgtggatcaagcaacataacctgaaagccgatgccctggtggcgctgtacggtaatgacaaagatgtcgacgccgtcaaaacgcgactgcaaaaagcaggttttacgcatatctccattctgagtgacgcgctaagcgaaccttcccgtctacaaaaactgccgcactttgagcagctggtttatccgcaatggctgcacgacctgcaacaaggtaaagaggttacggcgaaacctgccggtgactggaaagtcattgaagcggcctggggcgctcctaagctttaccttatcagccatattcccggtgctgactacatcgataccaacgaagtggaaagcgaaccgctgtggaacaaagtttctgatgaacaactaaaagcgatgctggcaaaacacggcattcgccatgacaccacggtcattctgtacgggcgtgacgtatacgctggagcgcgtgtggcgcaaattatgctctacgcaggcgtgaaagatgtgcgtctgctggatggcggctggcaaacctggtccgacgcgggactgcctgttgagcgaggaacgccaccgaaagtgaaagcggaaccggatttcggcgtgaagatcccggcacaaccgcagttgatgctcgatatggaacaggcccgtggactgctgcatcgccaggatgcatcgctggtgagcattcgttcgtggccagaatttatcggtacgaccagcggttacagctatattaaaccaaaaggtgaaatagccggagcacgttggggacacgctggtagcgactcgacgcatatggaagattttcataacccggatggcaccatgcgcagcgccgatgatattaccgctatgtggaaagcgtggaatatcaaaccagagcagcaagtttcattctactgcggcaccggctggcgcgcgtccgaaacctttatgtacgcacgcgccatgggttggaagaatgtttccgtgtatgacggcggctggtacgaatggagcagcgatccaaaaaatccggtagcaaccggtgaacgcggcccggacagtagcaaataacattgcaattactgacgctggtgcgacttcagcgtcagatacccactccacacccgcgtaaaggtcgtcatccagcacaacgcaccgaagatccacgcaaaccacgcaaaccatgcagggaataaacatcccagcacaaacagtaagatcgtttctgtgccttcggttaacccgcccagataataaaacgatttatgcgcataaccgggattatcaatctgatgtttcgccgccagcgcagcaaaagcgagaaaactgctgcctgtgccgataaacgcaaacagcagccagccgcctgccagggcgttttgctgcggtgcggcgaggataaacccaaaaggtaccagcgcgtaaaaaagaaaatcgagagaaatatcaagaaagccgcccgcgtcggtaagccctctgcgccgcgccagcgcaccgtccagaccatcaagcagcctgttcaacaaaatgacgacaagcgccgccagataccagcccagcgccagaaaaggcagtgccagcacgccgatggcaaatcccactaatgttaaaccatctggcgtaatgcccggtttatcaagaacccgcacgcactgatgcaacaacggtttaatccggggatgaagatggcggtctagcacaggcactccttaaatataaagcctttctgattgagcaacagtgcggatattatggcatttttcgcttatctgcccgtgtgtaatttatgaaaatgattgaagttgttgccgccatcattgaacgtgatggcaaaattttactcgcgcaacgccccgcccagagcgatcaggcgggattatgggagtttgccggtggtaaagtcgagccggatgaaagccagcggcaggcgctggtgcgtgagttacgcgaagaactgggcatcgaagcaactgtgggtgagtatgttaccagccatcagcgagaagtttcgggccggattatccatcttcatgcctggcacgtacccgacttccacgggacgttacaggcacatgaacatcaggcgctggtctggtgctcacctgaagaggcgctgcaatatccgctggcccctgctgacattccattattagaggcgtttatggctttacgcgccgccagaccagcggattagtgctaagggttttgtcatcccgctggcattgcagcagtattccctcggctttaattaccgcgccttcagaataatttttatcctgataaacgcagcactgagtacagggctgcgctgactgcccgcctgaactgaacacttctggcggtacgtttacctccacgtccggacgataatgcgggttagccagtgcaattaatggaaatgctaatactacggcgaacaatgctcgactcacagggaactccttaacgttattgtctctgctactgataacggtagccgggtggcaaaactttagcgtctgagttatcgcatttggttatgagattactctcgttattaatttgctttcctgggtcatttttttcttgcttaccgtcacattcttgatggtatagtcgaaaactgcaaaagcacatcacataaacaacataagcacaatcgtattaatatataagggttttatatctatggatcagacatattctctggagtcattcctcaaccatgtccaaaagcgcgacccgaatcaaaccgagttcgcgcaagccgttcgtgaagtaatgaccacactctggccttttcttgaacaaaatccaaaatatcgccagatgtcattactggagcgtctggttgaaccggagcgcgtgatccagtttcgcgtggtatgggttgatgatcgcaatcaggtacaggtcaaccgtgcatggcgtgtgcagttcagctctgccatcggcccgtacaaaggcggtatgcgcttccatccgtcagttaatctctccattctcaaattcctcggcttcgaacaaaccttcaaaaatgccctgactaccctgccgatgggcggtggtaaaggcggtagcgattttgacccgaaaggtaaaagcgaaggcgaagtgatgcgtttctgccaggcgctgatgaccgagctttatcgtcatctgggcgcggataccgacgttccggcaggtgatatcggcgttggtggtcgtgaagtcggctttatggcggggatgatgaaaaagctctccaacaataccgcctgcgtcttcaccggtaagggcctttcatttggcggtagtcttattcgcccggaagctaccggctacggtctggtttatttcacagaagcaatgttaaaacgccacggtatgggttttgaagggatgcgcgtttccgtttctggctccggcaacgtcgcccagtacgctatcgaaaaagcgatggaatttggtgctcgtgtgatcactgcgtcagactccagcggcactgtagttgatgaaagcggattcacgaaagagaaactggcacgtcttatcgaaatcaaagccagccgcgatggtcgagtggcagattacgccaaagaatttggtctggtctatctcgaaggccaacagccgtggtctgtaccggttgatatcgccctgccttgcgccacccagaacgaactggatgttgacgccgcgcatcagcttatcgccaatggcgttaaagccgtcgccgaaggggcaaatatgccgaccaccatcgaagcgactgaactgttccagcaggcaggcgtactgtttgcaccgggtaaagcggctaatgctggcggtgtagcaacgtcaggccttgaaatggcgcaaaacgctgcgcgcctgggctggaaagccgagaaagttgacgcacgtttgcatcacatcatgctggatatccaccatgcctgtgttgagcatggtggtgaaggtgagcaaaccaactacgtgcagggcgcgaacattgccggttttgtgaaggttgccgatgcgatgctggcgcagggtgtgatttaagttgtaaatgcctgatggcgctacgcttatcaggcctacaaatgggcacaattcattgcagttacgctctaatgtaggccgggcaagcgcagcgcccccggcaaaatttcaggcgtttatgagtatttaacggatgatgctccccagggaacatttcttatgggccaacggcatttcttactgtagtgctcccaaaactgcttgtcgtaacgataacacgcttcaagttcagcatccgttaactttctgcgatagcagcagatatgccagtaaagaaatcccattagactatttttttgataatcttcttcgctttcgaacaactcgtgcgcctttcgagaagcaagcattatataatgccaggccagttcttcttcaattgtcccgttttgaaaagctgtgcttgatatcgagatcatccatgataattccgccgcccatattagcttcgccgaggatttaccggagcgattattagcgcaatcagagatatagtctgagggaaaaacagcaaatttattcaacaaggcgataacctgctctggggcttcctccatgtttgctttaaaggtattggctccatggtcgccagaaagaaaatgctccattaaggcacaataactttcgctatcttcgataccccattgatcctctaaagactcgcgtcttttacttatgatatcgatcgagtcaaaaggaagcacatgatattggaaggtatctttgccaggttcaggctttcgcggccagaactccagcgtttcagaccattgcttatgatagaatcgataaggtgcgatcaattgtagcgcctgtaacttctcgatactgagcggctcaatacctttagcctgataataatgcagttgttctttttttgctttaaaaccggcccgaacaataagccccatcataattaatagataaagaaaagagcatcccgcggtaatcaggcctctttcattcaaaccgttggatgttatcgctgcgaacacaaacattacagcgacaacacatgttaaataaaacccccacttacaaagcagcatggccttattttctttaatcatccgttcaaaattactattaaatatttcccagccattaaaagaatacttctcgctcccaggatggttttgtaataaaacttttttcatcacattccctgttattacatactttagaggcgataattttatccatgcaaaaaaatatccaacgaattttcttgatccgctggatatttcagaatatgactcgaatagcacgaaagattcactcgcttacgctatcgccccgcttccgacttcatctgctggcggactttttttcgcactacgtttacgcggtgcagcctttttcttatcagcactgccaccactgcccggagccacaatgccgcgaaactgccgcaccggcgtacgtttggcttgatcaataagctgatatagcgtccccaccagcggctgcataaagtcctgatagcgacactgcttttcgctgatttgcgtcagcaccgattcccagtgcgcggtcatgtccggtcgcgtcgccatttctggcagcgaatggaataacgcttttccggcgtcggtggagtggatataacgcccttttttggtcagaaaaccacgcttgaacagcagttcaataatcccggcacgggttgcttctgtccccagaccatcggtcgcacgaaggatctttttcagatctttgtcctgcacaaagcgcgcgatcccggtcatcgccgaaagcagtgttgcatcggtaaaatggcgcggcggctgggtttgccgctctaccacttcacctttttcacacagcaactcatcgcctttcgccaccacaggcaatggcgtgccgtcgttttcttcatcgcgctctttgctgcctaacagcgtacgccagcctgcttcagcaagaaaacgggctttagcgacaaatttgcctttggcaatgtccagttcgataacacacttgcggaacaccgcatccgggcagaactgcatcaggtattgacgggcaatcaggttatagaccttcgcttcgttctccgtcaggttgatcgcagaactccgtgcggtcgggatgatggcatggtgcgcatcgacctttttgtcatcccaacagcggttgcgtatatctggatctaccattggctgcggcaacagatctggtgcatgaacgctgatggcattcatcaccgcgtggcgtccggcaaaatgttcttctggcaaatagcgacaatcggaacgcggataagtgattagcttgtgcgtttcgtacagcttctggcagatatcaagcacgttctgcgcgctcagaccgaagcgttttgccgcttcaatctgcaacgccgaaagcgaaaaaggcagcggcgcggattctgattcccgtttatcgttatagctggtgacaatagccggttgaccactaatgcggttaaccacatgctccgccagtggacgatgtaacaagcgcccttcttcatcctggtacggttcacacgcttcgctcggttgccagatagcggtaaaccgctcatcggcaggtgtcacgatatgcgctttgacttcaaagaagtctttcgccacgaagttttcaatctcttcatcgcggcgcaccaccagcccgagcacgggtgtctgcacgcgtcccacggaaagtacgccctgataaccggcattgcgaccaagaatggtatacgcacgggtcatattgatgccgtacagccagtcggcacgcgctcgcgccagcgcagaaacgcacaatggcacaaactcactgttggaacgaagacggtcgatcgcccgctcaaccgcctgcgggttcaggtcgtttatcaagcaacgctgcacctgctggcgcttttccggtgccagttgcagatagtccagcacttcatccaccagcaattgcccttcacgatccgggtccccggcgtgaacgatttcgctggcttcatgcaggaagcgtttgatgacgttaagttgtttggtcacggagggtcggggctgtaattgccacttttccgggacaatcggcaaatccgcaagattccagcgcgcatagcggctgtcgtaggcgtctggctgcgcctgctcaagcaggtgaccgatacaccaggtcaccacctgaccattaccgcactcgataaagccatcgcctttacggtgcggtttgggcaggacatcagcaatggcgcgcgccagactcggtttttcggcaataaacaaccgcattgaattaacggatctcaaccatggcacgaccgccgcgcgctggcaccagttcgccaatcgccgtcagttcaatgccaaactcggcggctgtagttttaacctcattttctgcttccggcatgaccgccagcagcaaaccgccagaagtttgcggatcgcacagcagatcgcgcacttcacgcggcatttcacccatcagatgaccgtagctggcaaagttacgttcggtgccgccaggcactgcgcccaacttaatgtactcttcaacccccggcaattttgggatcgcgtcatagtcaacgcgcgcctgcacacctgcgccctgacacatttcgctcaaatggcccagcagaccaaaaccagtaacgtcggtcatcgcttttacgccttcgatgttggcaaaggacgcacctgcgatgttcatccggcacatcacttccgtcgccagtccctgatgttctggtttcaacagtgattttttctcagccgtggtaagaacgccgatccccagcggtttcgtcaggaacagtttgcatccggcttgtgcggtactgtttttcttcacccgctcggtcggtacgatccccgttaccgccagaccaaaaatcggctccggcgcatcgatggagtgaccgccagccagcgcaatacccgcctgacggcatgcatagcgtccaccttcggttacttcgcgggcaatttccggggaaagtttgttaatcggccagccgaggatcgcaatcgccataatcggtttgccccccatcgcgaagatatcgctgatggcgttagtcgccgcaatgcggccaaaatcgaaaggattatcaacgatcggcataaagaagtcggtggtactgataacgctggtgccattgcccagatcgtacaccgccgcatcgtcgcgggtctcattacccacaagcaaattcggatcaacaaacttcgcctgctcactgtgcaggatggtttccaacacttttggggaaattttacagccgcaaccagctccgtggctgtattgggtcaaacgaatcgagttctcgctcatggacatctcctgtcaatgcaatccgggtatggtaaccctcattccgtgaagtgataagtgagagtgtctgaattcctgcgcctttgctcacaatccagacagtttcgcgacaattatcagaaataagttacaaacggcgtcgggtccgggacgttaatcgacgtagatgctttcaactgcggcgtgccgaggtagagaaaaccgacaattttatcctgctcacggcaaccgaatgcttcacgcactaccggactttcagttaatgcgccactgcgccagatgccgccaaatccttgggcaacggctgccatttgcatcgccatgaccgcgcatccggcagacatttcctgttcccatcgcgggactttatgattttcttcgcatttcgccaccaccgtgatgatgagcggtgcgcggaacggcgcattacgggctttgtcgatagctttgtcatcactaccggcagcaatcgccccctgttccagtacggcgctgaaacgctcgcgcccttccccttcaatcacaaaaaatgccacggttgcatggacttatggtccggcgcacgcatacccgcacgcaggatgttttgcagttgttcacccgttggcgcgggttcagccaggcgggaggcgctacggcgattgatcaatagttcgagtgcatccatttgattaactcctgtcgtgatatttattcacaaaattaacacgagagtggattttgttacagcacagtccgcaattcctgctgacaagtgccggttgggtcattacgataaccacatctattgcgcctgtgacaggtgtgaccttaagttgggagaatacatgcgaaccctttggcgatttattgccggattttttaaatggacgtggcgtctgctgaatttcgtccgtgaaatggtacttaacctgttctttattttcctcgtactggttggtgtggggatctggatgcaggtcagtggtggtgattcgaaagaaacggccagtcgtggcgcactgctgctggacatttctggtgtgatcgtcgataaacccgacagttctcagcggtttagtaaattaagccgccagctgcttggtgccagttccgatcgtctgcaggaaaactcactgtttgatatcgtcaacaccattcgccaggcgaaggacgaccgcaatatcaccggtatcgtgatggatctgaaaaacttcgcaggcggcgaccagccgtctatgcagtacatcggcaaagccctgaaagagtttcgtgacagcgggaaaccggtttatgccgttggcgagaactacagccaggggcaatattatctcgccagtttcgccaataaaatttggctgtcaccgcaaggcgtggttgatctgcacggttttgctaccaacggtctgtactacaaatcgttgctggataagctgaaagtttccacccatgtgttccgcgtgggtacgtataaatctgccgttgaaccgtttattcgtgatgatatgtcaccggcagcgcgcgaagctgacagccgctggattggtgagctgtggcaaaactatctgaatactgttgccgctaaccggctgatccctgctcagcaggtattccctggcgcgcaagggttgcttgtgggtttaaccaaaaccggtggcgataccgcgaaatatgcactggaaaacaagctggtcgatgcactggcatcgagtgccgaaatcgaaaaagctctgaccaaagagttcggctggagtaagactgataaaaattatcgcgccatcagttattacgattacgcattgaaaacgccggcagataccggtgacagcatcggtgtcgtcttcgctaatggcgcaattatggatggcgaggaaactcaggggaatgttggcggtgataccactgcggcacaaatccgcgacgctcgccttgacccgaaagtgaaagcgattgtcctgcgtgttaatagcccaggcggcagcgttaccgcgtctgaagtgattcgcgctgaactggcagcagcccgggcagcgggtaagcctgtggttgtatcgatgggcggcatggcggcatctggtggttactggatttccacgccagctaattacattgtggctaaccccagcaccctgaccggttctatcggtatcttcggcgtgatcaccaccgtagaaaatagtctggattcgattggtgttcatactgatggtgtctcaacttcaccgctggcggatgtttctatcaccagggcactgccgccggaagcgcagcagatgatgcaattaagcattgagaatggctataaacgctttatcacgctggttgctgatgcgcgtcattcgacgccggagcaaattgataaaatcgcccagggccacgtctggaccggtcaggatgcaaaagctaacgggctggtcgatagtctcggggatttcgatgatgcggttgccaaagcagcagagctggcaaaagtgaaacagtggcatctggaatactacgttgatgaaccgaccttcttcgacaaagtgatggacaacatgtctggttctgtccgggcaatgttgccagatgcgttccaggccatgttacctgcaccgcttgcctcggtagcctctaccgttaaaagtgaaagcgacaagctggccgcgtttaacgacccacaaaaccgttatgcgttttgcctgacctgcgccaacgtgcgttaagtcttgtactgagtggccgacagatcgtcggccacattattttttacctcgacgaatcctcttcccgctgtctcgccccatatttccttatccgcatagtatcaggtgcgctcctcctgcctcacgtatatacttttgctctttcgatatcattcatatcaatatcatgcaaaagaaatcaatttacgtcgcctacacgggcgggaccatcgggatgcagcgttccgagcagggttatattccggtgtcaggtcatctacaacgccaactggcgctgatgccggaattccatcgcccggagatgccagatttcaccattcatgaatatacgccgttgatggattcttctgatatgacgccggaagactggcagcatattgctgaagatattaaagcgcactatgacgactatgatggttttgtcattctacacggtaccgacacgatggcgtataccgcctctgcgctgtcgttcatgctcgagaatctcggtaaaccggtcattgtgacagggtcacaaatcccgctggctgagttacgctctgacggacaaattaatctgctgaatgcgttgtacgttgcggcgaattatccgatcaacgaagtaacgctctttttcaataaccgattgtatcgcggcaaccgcactaccaaagcccatgccgatggttttgatgcgtttgcctctcctaaccttcctccgttactggaagcaggtatccatattcgtcgtttgaatacgccacccgccccgcacggtgaaggggaattaatcgttcatccaatcaccccacaaccaattggcgtagtgacgatttatccggggatttctgctgacgtcgtgcgcaattttctgcgccaaccggtgaaagcattgattctgcgctcctatggcgtgggtaatgcgccacaaaacaaagccttcctgcaggaattacaagaagccagcgatcgcggtattgtggtggtcaacctgacacaatgtatgtccggtaaagtgaatatgggtggttatgccaccggtaacgccctcgcccatgccggcgttattggcggtgcagatatgactgtagaagccacgctaaccaaactgcattacctgctgagccaggaactggatactgaaaccattcgcaaggccatgagccaaaacctgcgcggcgaactgacgccggatgattaaggagactgcaatgccccatcgcgccctgttactggtcgatttacaaaatgatttctgtgctggtggcgcgctcgccgtaccggaaggtgacagtacggtggaggttgctaaccgccttattgactggtgccagtcgcgcggagaagcggttatcgccagtcaggactggcacccggcgaatcacggcagttttgccagtcagcacggtgtagagccttatacgccaggccaactcgacggtttgccacaaaccttctggccagatcactgtgtgcagaacagtgaaggcgcacaattacatccgttactgaaccaaaaagcgatcgcagcggtgttccataaaggcgaaaatcctttagttgacagttacagtgccttttttgataacggccgtcggcagaaaacctctctcgatgactggttacgcgatcatgaaatcgatgaattgatcgttatgggcctggctactgactattgcgtgaagtttaccgtgctggacgcgttacagttaggttataaggtgaacgtgattaccgatggttgtcgtggcgtgaatatccagccccaggacagtgcacacgcgtttatggagatgtcagcagctggggcaacgctatatacgctggcagactgggaagagacacaggggtaattttacgctggcctacaattctgtactggcattgtaggccaaataaaacacgtcagtggtacatctggcaattgatgccatcaacgaaagatttaattcacctcagaaatctcttccagcgacaccttccgcgtttcgatgccaaaaatggagagaaccagcgcacagagcactaacatgacaccaagcaccataaacaccgtgatcgacccataatgtgttaataatgccgcaacgccatagggcgtgaaaactgcgacgatccgtccgacggcattaacgaaacccgaaccgcgcaggcgtaaatgcgttggccaaagctccgggatataaaccgctgacgcgaagcaaacatacatgtataaaaagaagatcatcaccagaccatagattaaaatcgcccactctgtagtctgaattgaatagatatagcctaacacggcaataataataagtaaggcggagccaaataatcgacgaggaaaatgatcaataattaatgccgcaataaatattcctaccggagcaccaatcataataacagcggtcattaatattgatttatcgacatcaatcccggagttaacaaatatggtcggtatccatacggtaatggtataaagcgaaatgttcattgcaattaaaacagttatcgcaactaatgtacgtcgtaacatttcccctttaaacaggagccagaaggtacccttgattaccttaaccttgctgttgctctggttcaaagtaagctggggtaaacgaatactcttctccctttcaatttgctgctctacttcacgaagttggctttctgcaccggcgatttgccctttccctgccagccatcgtggcgactcgataaagtatttacctgagagaaaccaggctaacagtatgccaataccacccagaagaaacattattcgccaactaaaaaaagcgataaccaccacgcctatcgccgcagacagcatgggcgaccagttaccaacaaatgagagccgcgcggaccattttccacgcaccgtcgcggggataaactccgtaaatgaggcatagccaaccataatcagcgcccccattcctgttcccatcaggaagcgaaagaaaatgagccagtacatatcagggacaaaagcggcccctgttgcagcaataccgacgatgagaagatttatgcgaaacgccctgcgccgcccaaagtagtcaccaataaacccaccagtaagtgagccgatgaaataaccaaacattaatgccgaggtaaaggcggcattgaggaaattatttgaccatccattgcttaccagctttgctaagacgacattacctgagtaactcaaaaaccccgttaataacagactaaagcttattataccaaatatacgataatgaaaccgggccaaaggcaagcggtccagtcttgcgccaatttgatcatattgttccattaggtgcctcggatttgctaaaaaggtagcaattgcggcaaattcacttgccgcatctttatcatcattttatttcaaggcgcaggaacaaataatattgacaacgtgtgcttaaattaccacaccagctggatattattgtctttgcaaaatgctatccactctgcacccggtgatttatcagttattatgtaattaatatgactaaaatcagctaactggacaaaagctttgcgatcaaacttagagtgatcaaccaataacgcaacttctgtcgcctgacggatcattgtctttttgatttcagcttccgcttcattagagtccagcgcgccgctgttaatatcaagacctttacaactcattaccatgatatcgacatgatagcggctgatgatctctttagtaattcttccttgcagtgaaagtgtatttttgtttagttccccacccgttgaaacgactttaatttctgactgagccagaacatgaatcgcttccgccgagttggttagcaacgtcaggtcactacggtcctgtaacaatttgagcaattccattacggtactactggaatcggctgccatggtggttttattgtcgataaagggtagtgccttgcgtgcaataagctgcttctcttcataaaacgatgaagcgcgcttataaaaatggatattctccgtcaacatcgctgtatttaaaacagcaccaccataggttctggtcaaaaagccttcatcttccagcttctcaagatcgcggcgaatggtttcttcggttacctgaaaaatcccactcaaatttgagactgtcacttttttatcgttggcaaccatttgcttaattgcctgaatcctgtcttttgccgccacgattacacccctgtatctttttacatcacattagcgcgattatcgcataaccgatgtttactttcaaaataacctgtttgaatcacagattttcatcacagttttcacagaaacagaggtgaatcgtgttgagtatttaacgctccagggcctctgccatttccctcatcaatgttgcgtctgcatccgataagttgatattcagtgccgcgacattttcgcgtacctgttccggtgcagtagccccactaagaatggagattaaatcactctgttttaatatccacgccagtgccagagtgggaattgtgcactgataacgagcacaaagtggctgccactgttcaagcatatcaatcactttcagcatgttttcacgctggaaccagactttatttgcccgagcgccgcccggaacgtaatcacgagtgatggtgccggtcaacaatccctgctctagcggggaataaacctgaaccacaatgccattatcacgacatagtggcagcagttcgttttccattgcccggtcgaggatactgtatttcgcctgaataatatccagttcaccatattgcagatactcgcggatatggtcagcatcgacgttagcagcgcctatagcgcgaattttcccttcagactttaactcattaagcactgcgacagtttcagcgatcggcgtaaaaaatggcggcaccgactgccagtgcgtcatgtagatatcgatgtaatcaatacccagacgttgcaagctcgctgctacctcttcgcggatagattccggggaaaggtttttatacaactgccgatcgccaactttgttgaataaacttccttttcgttcccagacaatgccgcatttggtttctactacaacctgttcacggggcagtttttttaacgcctgaccgacgataacttcactattgccaaagttatatcctggcgcagtatcaatcagattaatgccacaacgatgggcttcaagaatagtatcaatacatatttgccgatcgagatcgccattccatgcaggaccgccgccaatggcccatgtccccaaccccattcgcgaaagcgtaatatccgttgtgcctaaaggtatctttttcatttgccttcattatccttcgtattcttccagcaattgttcgaccagctttctgttttttacgccggtggtggcaccgacgcttagaaccgagatagccgccgttgcattggcaaagcgtgcgcattcacgcagatttttgccttctaacagtgccgcaataaaacctgaagcaaagttatcgcccgcgccaatggtgtcgatggcggttattcctgcgaccgccggcaccttcatcgtcatgtcaccacgcttgataaagcagccgtctttacccgttttaatcaccaccgtttttacgccgcacgcaagaaagcagtcagcaatttcatccagtgtctctttcccggtgagtaattttgcctcggcaaaattaggaaacagataatcgacataactcaatgcttcgcaaatatcatccagcgtttcattcaaccgcggtttgatcatatcggcacagataatcatctgccgggctttagcttgcgtaaaaatttctgttagcgctttaccatccaatagtggactgttgaaaatactggccagtgataataatttcgcctgagaaaaccgcgcaaaatcaacatcgtcaatattcaatttccacagactgccattacggtttgtgacaaacgtccgctcgccatcctccgtcaccagtccaacgttaatagaggtatctatgctgacgtcctgcttcaggctttgaatatcaatattctctttgcggcaatggtcgagaataaattgccctgcggcatctttaccaatacgactcattaatgctgtgcgatggcccagacgagaaataattgttgcttcatttattgcatcacccccggtggtcattgcgattctttcaagaggataagaatccacatcaaagatatttttactgaccggttgcaatggaatatcaacaatagcggcacctatacaaataacgtcgagattatccatatcattattccgctttgccatcagaaccgaacagtttaattttttccaatgcccgttcttttacagctttacgtacttcacgttctaaatgcaggaaaggctgatcctggttttctttcactgcaaccattgcggcctgacagagctccgtatgaatgttgattttcgcgatacccaacgaaattgcagttttaatgtcggcatcactgatccccgatgcaccgtgcaaaaccagcggaacagaaacggcatcgcgtacgcgtttgacgacctcaaagttcaattgtggctctgacgtataaaccccatgctggttgccgatggcgacagccaatgaatcacagcccgtacgttcaacaaattcagccgcctggtcaggatcggtatagtgatagcccgccagcgcttcctcataaacggtttcattaccgacatgccctaattccgcctctaccggaatacccagcggatggaagaaatcgacagcctctttggttaaacgaatattttcttcgaaatcaaacgcggaagcatcacgcattaatgaattcataccatgagtccaggcgttatgaataatctccatactccgaccatgatcccaatgagttattaccggcaccgttgctttttgtgccattgataccatcatgtgagagaaatcttcaaatgaggtgttaccgacaaaacctgtaccaaaagaaataataaccggggatttcgcttcttcggctgcgtcgataacgcccatcaacatttctgcattccatacgttaaaatgggcaattgcataatgtttatttgtggcatcgttttcccaatatctgatatctgcgagcatgttctgttctcccgtattaattaatcgctaattttaataacgcctttaataatgtcgcgtttgttgttaactgactcttcaaatgcctgttgtacatcccgataatcgtaaatatgcgtcaccatcgatttcacatcgaatcgccctgaagaaatagcttcaatcgtgaccggataacgattggcatagcggaataccgtctggatagtgacttcgcgattgattttgaggaaattgattgccgaatcgccgggtacagtaccaacaatcataattttaccgccgcgcattaccagataaggtgcctgtttaacggtgaccgcagaacccgctgtttcgaaaacaatatctgcgcccatgtcttcggtaaattgctgacagcgtgcaatagtgtcttcttttgtgccgttaataaccactgtcgcaccaagttgttccgccattatcagacgtttttccagcacatcaacgacggcaatttccgttgcgcccaggcatttgcacgcttgcaacgtcatcaaaccaatacaacctgctcccagaataattatcttcttacccggtttaacatctgccagcatcgcggcatgcatcccgactgcggcaggctccaccagcgccccttccatcgtgtccatattgtctggcagtttgtaagtaaagctctccggatgacacagatagtgcgttaatgcgccgcggtagttgggttgtgtcgccataaaatcaacgtccgggcagatgttatatttgccttccagacagtaacgacagtgaccgcaaggaacgccaggttcgatatttacccgatcccccggtttaaatttgcgcacgcggcttcccacagccacaaccgtcccggcgcattcatgacccaggccaatttcttgatttgggtctttaggcggaataaacgggcctgattcaaaaccatgtacatctgaaccacaaataccgacatattctactttaatcaaaacttcatcttctttaggcactggtatttctgctgaaataattttcattgtgcccggcacctgcaatattgcttttgaatttttcattttgaatccacccgtattatttattggctactgcatcaatacttaaactttcaacggagacacctttggtttcaattccaatggtggcgatagcaattgcgacaacaattgaaacagcccccagaagaataaagactcccgttacgccataactactgagcagcactgcaacggcataaggtgcggcaataccactgattcgccctaccgcattcgccagaccggagccacggagtttggcctctgtcggccagatttcagggacatacactgccgaggcatagcaaacgtacatatagacgaaagtaatcaggaagaaaccaatcaacgttatgagcaacatactggtttgcagtgaatagatatatccgagcaccgcaatcaggattaatagccccacacccattgttttacgcggaattttatccatcaccagcatggcaataaaaataccaaatggcgcgccaaacatactcatggtatttaaaacaatcgagtcttttaaattaatcccctgggtcatgaatattgttggcaaccagttaattagtgtgtactgcacaacgttcatggcaatcagcacacaagagcctaatatcacgcgtttcagtaatactcctgtcagtaaggctgaatacggcaccgcttgtggcgctttaccgtcatcagcaataaccacaggcggcaaaggttttcccgtctggcgtatgacgccttcttctatactccgcatgactttctcggcttcttgataccgtccgcgcgattccagccagcgcggggattcaggaaagtagcgccaggccagcgccgtagcgataagcgacaatattgcagggataagcagttgtacccgccagttccactctgcactaatcagcggcgtgagtcccatcgcaatcaatgaacagagcggatatgaccagttgccaataaaggaaacccgactggaccacgttccgcgatttctaccgggcatatattcggtgaaaccagcaaacagtgtaaccagtaaagctcccagcccaacgcccatcacaaaacggcaggcaataagaaaatccatattcggtgagaaagcaccgacaaccatcgaggcaatatgaatggcctcatagaggatgaacgcatttctgcgaccggttttgtcgccaatgatgccgcccaccagcgcaccgagaaacattccggcggtcgtgattgctgagaatgtggctgtggtggaattatctgtccagcccaacgctttcagctgcgcgaggatcaagccaccaacggcattactccagcagacaagcaagccaaacgcgacgatggcaaacattgacgaatgccagcggcaatccggtaagcgatccagccgtgcaccacaatgcggttttgttatctgttccatgcgataacgttccttcaggagagtagttattcatcaaagtcgtaagtcatgatcactttgattgcggttttatcgaccatcgcatcaaacccttcgcgccattgcgacaggccgatacgatgcgtgatcatcggtttgactttgatagcgccgctggctaatagccggatagcgttacgccatgaggtggagtcataggccatatgcccaatgatgcttttattccaggcggtaatgtcattaatcgagaaatcaagaggtttgaagcccattccaacgcgtaccacttccccattcgggcggagcatttcgatggcttgtttcagtgcgatattggcaccggagcattcaatcaccagtcccagattatctttgccacaaatttgctggcagcgcgccaccacatcttcggtagaaccatttactactgccgtcgcccccagttcttttgcaaccgggaagcggaccgccacatcttcttgcagaccaacgacgacgatatttaccgcccccataatccgcgccatttgtacggaaaacagcccgagtgggccagtgccgatgacgacaacatcctgaccaggaaggaatttcgattgctgcgcgatggatttataggcattacagatagggtcaagtacggctgcgtcctcataatcaacaccatcaaggatttcccacaacgcatgacgatgaattttgagaatttcaccaggaaccagacaatatttggaaaaaccaccgccccaggtattgttatccagaccaaggtttactttttctgtacaacacagaaaatcaccctgttcacaggccggacaaacgccgcaaacgtgaccgctgttatccgacacgacgcgttgccccactttccagtctttgactttttcaccaacctgcgcaatacaacctgcgaactcatggccgcggatagagttaaactcatcagaaccgctatcgacattgtagtgcttcatgtctgcgccgcagattgccgcggctttaatttcaatcactacgtcttccgggccacaaatgggttgtgggacatcaatcatcttgtagccgccaaaggccttgccaaaccgagccagtgctttcattgcgtcatcctctgtgttttgttttgcttagatggccatcatacttacccacatgatttttgaggtcaacattaaatctgtaaaacacagataatgatctgcgttttacaacttagatcacaattacgcagaaaatggctgggtctgttacaggttggtggaaggcgggacgcaaaaagagcaaattcgagagggattaccggccaaataggtctgagacttaagttcaggagaagtcattcaggcgtgaacgcgactgcaagagatcggactgggacttagccaggtcgggtcgagataattgagacgagtcgtggggtcattgttggctatccccttcatagccgcggcaaaaaggggataaaccacttacttaaacatagcaataggctttgctgagataccaaaatcttcttttaactgctgtttgctcttcatgaccatctgaccatttgtgtcaattgtcatatgctgtgcttcggtattatggcgggcttgccacagcatcaccagttgcaggcaattctctttttgttcctcggtcaacgcaacgccatcaggccatttccccagttcaacggcggtcgacaaacgctggtatacctcaggcgtcatgctgttgataatgtcatcaagattcataatttttccgctcctgtggaataagttgctgaatcgttttttcaaccgttgatttcttcgccgttttcgccatcggtaaagcgtaaagaggcagagttaacacaataacgttcgcccgttggctgcggcccgtcagggaagacatgccccagatgggcatcacagttaccgcaacgaatttctatgcgctgcattccatgtgacaagtctttgatataacgaatggattcttcactcaccggttcgtagaaactgggccaaccacagccggaatcatacttggtttgggaatgaaacagcggggcatcgcagatcaaacagtgatatacgccgtcacgcttgttatgcagtaaacgacccgtaaatggcggctctgtcccatgattctgcgtcacgtaaaactgcatctcggacaaattttttttcagttcttctgccgaaggtttattagccatttgctcacatctcactttaatcgtgctcacattacgtgactgattctaacaaaacattaacaccaactggcaaaattttgtcctaaacttgatctcgacgaaatggctgcacctaaatcgtgatgaaaatcacatttttatcgtaattgccctttaaaattcggggcgccgaccccatgtggtctcaagcccaaaggaagagtgaggcgagtcagtcgcgtaatgcttaggcacaggattgatttgtcgcaatgattgacacgattccgcttgacgctgcgtaaggtttttgtaattttacaggcaaccttttattcactaacaaatagctggtggaatatatgactatcaaagtaggtatcaacggttttggccgtatcggtcgcattgttttccgtgctgctcagaaacgttctgacatcgagatcgttgcaatcaacgacctgttagacgctgattacatggcatacatgctgaaatatgactccactcacggccgtttcgacggtaccgttgaagtgaaagacggtcatctgatcgttaacggtaaaaaaatccgtgttaccgctgaacgtgatccggctaacctgaaatgggacgaagttggtgttgacgttgtcgctgaagcaactggtctgttcctgactgacgaaactgctcgtaaacacatcaccgctggtgcgaagaaagtggttatgactggtccgtctaaagacaacactccgatgttcgttaaaggcgctaacttcgacaaatatgctggccaggacatcgtttccaacgcttcctgcaccaccaactgcctggctccgctggctaaagttatcaacgataacttcggcatcatcgaaggtctgatgaccaccgttcacgctactaccgctactcagaaaaccgttgatggcccgtctcacaaagactggcgcggcggccgcggcgcttcccagaacatcatcccgtcctctaccggtgctgctaaagctgtaggtaaagtactgccagaactgaatggcaaactgactggtatggcgttccgcgttccgaccccgaacgtatccgtagttgacctgaccgttcgtctggaaaaagctgcaacttacgagcagatcaaagctgccgttaaagctgctgctgaaggcgaaatgaaaggcgttctgggctacaccgaagatgacgtagtatctaccgatttcaacggcgaagtttgcacttccgtgttcgatgctaaagctggtatcgctctgaacgacaacttcgtgaaactggtatcctggtacgacaacgaaaccggttactccaacaaagttctggacctgatcgctcacatctccaaataagttgagatgacactgtgatctaaaaagagcgacttcggtcgctcttttttttacctgataaaatgaagttaaaggactgcgtcatgattaagaaaatttttgcccttccggtcatcgaacaaatctcccctgtcctctcccgtcgtaaactggatgaactggacctcattgtggtcgatcatccccaggtaaaagcctcttttgcattacagggcgcacaccttctctcgtggaaacctgcgggtgaagaagaagttctgtggttgagcaacaacacaccgttcaaaaatggcgtcgctattcgcggtggcgtaccggtttgctggccgtggtttggtccggcggcacaacaaggtctgcctgcgcacggttttgcccgcaacctgccgtggacgctgaaatcacatcgtgaagatgctgatggcgtagcgctgacttttgaattgacgcaaagcgaagagacgaaaaaattctggccgcacgactttacgctgttagcgcatttccgcgtgggtaaaacctgtgaaatcgatcttgaatcacatggcgaatttgaaaccacctctgccctgcatacctactttaacgtgggtgatatcgctaaggtaagcgtcagtgggctgggcgatcgcttcattgataaagtaaatgacgcgaaagaagatgtactgaccgacggtattcagaccttccctgaccgtaccgatcgcgtgtatctgaatccgcaagattgcagcgtgattaatgatgaagcgctgaatcgtattatcgccgtaggccaccagcatcatctgaacgttgtcggctggaacccgggaccggcgctttcagttagcatgggcgacatgccggatgatggctacaaaacatttgtttgtgtagaaacggcttacgcttcagaaacgcaaaaagtgaccaaagagaaacctgcacatctggcgcaatccattcgcgttgcgaaacgttaatttgcgttaatgttgtgtgccgggtgcgatgcatccggcacgtatcaacatcacaccatatccagcgcagtttttccttttggtgccggatacgctttatccagcatggttaattccgctgacgaaagttcgacctcaagcacagccgcattctgttggacatgggcaatcgtggccgcttttggaatcgccatcacaccctgatggctgattacccacgccaacaatacttgtgccgcgctgatattgtgagcatgtgcaatttcgttgactaccgcgttttttaacagtccattgcgcaaccgcccggcctgggctaatggactgtaagccatcaccggcatctgctgttgctggcaccaggggagtagatcgtactcaatccctcgtgaaccgagatggtaaagcacctgattagtggcacactgatttccccccggcagctgccagagttcctgcatatcagcatgatcaaggttagaaacgccccagcggcggatttttccctgggcgatcaatttttccatcgctgccacagtctcttcaaaagcgaaactgccagaccagtgtaataagtagagatcgagataatcagtattgagacggcgtaaactggcttcgcatgcatttatcgctttttgcccgccagcattccacggatagactttagagacgagaaagacgttattgcgcagaccggttaatgcttccccaaccaccttttcggcaccgccatcggcatacatttcggcggtatcaatgagggttaaaccgagctcaatgcccgcgcgtagtgcagcaacttctgttttgcgctgactggcatcttcgcccatataccatgttccctgccctatggctggcagtgagacatcgccactaaattgaatcattttttgttgcattgtttcctcccaggtattgcaccaccgtaatgcaaaacagggcgtgacgccctgtttttatgcacaaaatgccctggaaagatgcattatcagaatttgtaggtgatcccggtagaaatcaggccagtccaggatttatccaccatcgggctgtcagtaacttcatcagacagacgggtatagcgcgcggtaccgtaaacactccagtcgccgaggaagttgtagctggcgctcagctccaggtaagggctccagctgtcgttcgggttatagccacgcagaccgctgcgagcggactctttgcgcgatacgccataatagtattcgttctggttttcgctgttccactgcacaccaatacccggagtcacggtcaggccaccgttggtgtaacgatacaaccaggccatatcccagacaatgccgttgctgttatccagggtatcgccagccagggtggtacgcaggtaaccgtactgggtaaagtgagcataagacagaccagccatcatggtgctcttacggtcatccaggtgacgcatttggtgatcgccactgtctttcgctttgaagtaaagcggcgaccagtaagcggtaattgaaagtttatccgttgcgtcattccacaggtagtaaccaccacctaagccacggaaccagaagttatcgccttcatagttgattaccggtactgggtaaacatcggtatcgtaatctttatatgggtgttcaacgacacctacgcctgcgcccagggaaaatttaccttcagcgtgcgctacgcctgcagacgttgcgataagcactccaagtgccagaagtttgagtttggtcacaattaatcattccttaaacaaatgtttagcgggcgacaaagtttacccgtcaatacatcgaaacccaacctttttacgttttcattttttaaagtaactgtttaattttcctgacgcggatgacaccgcgcttacagccaaatgaatttagcgttactggctaccctggtctttacattaattatgcaaaatttatggatgagttgttgatatgccattgaaattaagaaagccgtgcaggcaagttttccatttgccatctacgcttaattttgaaggtgtatcaccgggcacgttgttctcatcgtcgataaaatggcatgagagttgctgtgttttagcaagagacgtcgttcagtttacctcttccgggagcctctactattcatatgaacggctcttaacctgtgctaaaaaacgaaaggacggcataccatgaatatattcgatcactatcgccagcgatatgaagctgccaaggacgaagagttcacactgcaggagtttcttaccacttgtcggcaagatcgcagtgcttatgccaacgcggctgagcggctattgatggctatcggtgagcctgtcatggtcgatacagcccaggaacccagactttctcgactcttttctaaccgggtcattgcacgttatccggcgtttgaagagttttacggcatggaagacgcgattgaacagattgtctcttatctgaaacacgcggctcaggggctggaagagaagaaacaaatcctgtatctgctggggcctgtgggtgggggtaaatcatcgcttgctgagcgactgaaatcattaatgcagctcgtaccaatttatgtattgagcgccaacggtgagcgtagcccggtcaacgatcatccgttctgtcttttcaatccgcaggaagatgctcagattctggaaaaagagtatggcattcctcgccgttatctcggcaccatcatgtcgccatgggcggcaaaacgcctgcatgaatttggtggcgatatcactaagttccgggtagtgaaggtctggccgtcaattctgcaacaaattgctatcgccaaaacggaacccggtgatgagaacaaccaggacatctccgcgctggttgggaaagtcgatattcgtaaactcgaacactacgcgcagaatgacccggacgcctacggctattccggtgcgctgtgccgcgccaaccaagggatcatggaatttgtcgagatgtttaaagcaccgataaaagtgctgcatccgctgttaaccgccactcaggaaggtaactacaacgggacggaaggtatctccgccctgccgttcaacgggattattctcgcccactcgaacgaatccgaatgggtcactttccgtaataacaaaaacaacgaagccttcctcgaccgtgtttacatcgtgaaggtgccgtattgcttacgcatttccgaagagatcaaaatctacgagaaattgcttaatcacagtgaattgactcacgccccctgcgcccctggcacgctggaaacgctgtcacgtttttccattctttcgcgccttaaagagccagaaaactccagcatttattcaaagatgcgggtttatgatggcgaaagtctgaaagacaccgatcccaaagccaagtcgtatcaggaatatcgtgactacgccggtgtcgatgaagggatgaacggtctgtcgacgcgttttgcgtttaagatcctctcccgcgtgttcaacttcgatcatgtagaagtggcggcaaacccggtccatctgttctacgtactggaacagcagatcgagcgcgagcagttcccacaagagcaggcagaacgctatctggagttcctgaaaggttatctgatcccgaaatatgccgagtttatcggcaaagagatccagacggcctaccttgaatcctattccgaatatgggcaaaacattttcgaccgttatgttacctacgcggatttctggattcaggatcaggagtatcgcgatccggataccgggcagctgtttgaccgcgagtctcttaacgccgagctggagaaaatcgagaaaccggcggggatcagtaatccaaaagatttccgcaacgagattgttaacttcgtactgcgcgccagagcgaataacagcggacgcaatccgaactggaccagctatgaaaaactgcgcacggttatcgagaagaaaatgttctccaataccgaggagctgttgccggttatctcgtttaacgccaaaacgtcaaccgacgagcagaagaaacacgacgactttgtcgaccgtatgatggaaaaaggctacacccgtaaacaggtgcgtttactgtgcgaatggtatttgcgcgtacgtaaatcgtcttaacaaccctggcccggtacacatgttaccgggcctacaacgacagcgaaccgtgggcctgagaagcggcaacacaggcgtagcatacagttggcaaatgtagtacggggggcatatgacctggtttattgaccggcgtctgaacggcaaaaacaaaagcatggtgaatcgccagcgttttttacgccgttataaagcgcaaattaaacagtcgatctccgaggccattaataagcgttcggtgactgacgtcgacagcggcgaatccgtatccattcccacggaagatattagcgaaccgatgtttcatcaggggcgtggcggtctgcgccaccgcgtgcatccgggcaatgaccatttcgtccagaacgaccgaattgaacgtccccagggtggcggcggaggttccggcagtggtcagggccaggccagccaggatggtgaaggtcaggatgaatttgtctttcagatttcgaaagatgagtatcttgatttgctctttgaagatttggccttaccgaatctgaaacaaaaccaacaacgccagctgaccgaatataaaacgcatcgggcgggttataccgctaacggcgttccggcaaatatcagcgttgtgcgctccttgcagaactcactggcgcgacgcacagccatgacggcaggcaagcggcgggaacttcatgcactggaagagaatttggccatcatcagcaacagtgaacctgcgcagctgctggaagaggaacgtctgcgcaaagaaattgcagaattacgtgccaaaattgaacgcgtcccttttattgacaccttcgatttacgttacaagaactacgagaagcggcccgatccctccagccaggcagtgatgttttgcctgatggacgtttccggttcaatggatcaatccactaaagatatggctaagcgtttttatattctgctgtatctgttcctcagcagaacgtataagaacgtggaagtcgtatacatccgccatcatacccaggcgaaagaagtcgatgaacatgagtttttctactcgcaggaaacaggcggcaccattgtttccagcgccctgaaactgatggatgaggtagtgaaagagcgttataacccggcacagtggaatatttacgctgcacaagcatcggacggcgataactgggccgatgactctccgctttgccatgaaatcctggcgaaaaaattattacctgttgttcgttattacagctatatcgaaattacccgtcgtgcacatcagacattgtggcgagaatatgagcatctgcaatctactttcgacaactttgcgatgcagcacatccgcgaccaggatgatatttatccggtgttccgtgaactgtttcataaacaaaatgcaacagctaaagactaaaactatcagccaggtcattatcgcctggctgatttttagcttactgtaaattatctcatttattacatacattagcttacaatcgctttaaatatgacagcgtaacctttacataatttagttccagaaaacaatcattcggaaaaatgattcagtcaacacgtatttccatggggttattctttaaatattgtttatcgttaacgaaaattgatcctggtcaaaactatatatctctgccatcaataaaatccagcactcacattgctctcctttttatggtttctatgggtacacaaaaattaaaagctcaaagcttttttattttcagtttattgctgacgttaattttattttgcatcaccacattatataacgaaaacacaaatgtaaaactcatcccacagatgaattacctgatggttgttgtggctttgtttttccttaacgccgtcatttttcttttcatgttaatgaaatatttcactaacaaacaaattttaccaacactcattttaagccttgcatttttaagtggccttatctatttagttgaaaccattgtaattatccataaaccaattaacggcagtacactgatccagacaaagtcgaatgatgtttctattttctatattttccgccaactcagttttatttgtttaacctcgctggcactcttttgttatggaaaagacaacatccttgacaacaataagaaaaaaacgggaatcctgttgctggcgctgattccttttttagtttttccccttctggcacacaatctgagcagttataacgctgactattctttgtatgtcgtcgactactgtccggacaaccatactgcgacctggggaatcaactatacaaaaatattggtttgtctgtgggcatttttactgttctttattatcatgcgtacacgattagccagcgaactatggccgttaatagcattattatgtctggcatcgctatgctgcaacttacttctactgactctggatgagtataattacaccatctggtatatcagtcgcgggattgaagtttccagtaaactgtttgttgtgtcttttctgatttataacatttttcaggaactgcaactctccagcaaactggcagttcatgatgtgctgaccaatatttataatcggcgctactttttcaacagcgtagagtcattattgtcgcgacctgttgttaaggacttctgtgtcatgctggtcgatattaatcagttcaaacgcatcaatgcccaatggggacatcgtgtgggtgataaagtgctggtttcaattgtcgatattatccagcaaagcatccgccctgatgatattttagcgcgactggagggtgaggtgtttggcttgctatttaccgaactcaatagtgcccaggcaaaaatcattgcggaacgtatgcgtaaaaatgtcgaactcctgaccggctttagtaacagatatgatgttcctgaacaaatgaccatcagtattggcacggttttttcaacgggtgacacgcgtaatatctcgcttgtcatgacggaagcagataaagccttacgcgaagcgaaaagcgaggggggcaacaaagtgattattcatcatatttaagtgcaaaaatattcagagccatgctttttgcgtggcttttgcatacaatttattactattacccctaaatttcccctccccagcggcgcagagatgagtataattagcgcccctgtgccaggccgcaatcgaactttatctggttttctcgtttcactaaccgaaggagtgccatttatcatgaaattgcaccatagaatgctccggcattttatcgccgcaagtgtcattgtgctgacatcttccttccttatttttgaacttgtcgccagcgacagagcaatgagtgcctatctgcgctatatcgtgcagaaagcagactcctcctttctttatgataagtatcagaatcagagtattgccgcgcatgtgatgcgcgctctcgctgctgagcagtcggaagtgtcgccagaacagcggcgcgccatctgcgaggcttttgagtctgccaataatacccatggcttaaacctgactgcccataaatacccgggcttacgcggcacactacaaaccgcatccactgactgcgacacaattgtggaagctgcagcactattacccgcttttgatcaggcagtggaaggcaaccgccaccaggatgattacggttcaggtcttgggatggccgaagagaaatttcactattatctcgatctcaatgaccgctatgtctatttttatgagccggttaatgttgaatactttgcgatgaataactggtccttcctgcagtcaggaagtattggtatcgatcgcaaagatattgaaaaggtatttaccgggcgtaccgtattgtcgagcatttaccaggatcagcgtactaaacagaacgtgatgagtttgctgacgccggtgtatgttgcagggcagctaaaagggattgtgctgctggatattaacaaaaacaatttgcggaatatcttttacactcatgaccgccctctcctctggcgttttctcaatgtcacgctaaccgataccgattcggggcgcgacattatcatcaaccagagcgaagataatctgttccagtacgtcagttacgtccatgacttaccgggcggcattcgtgtctcgttatccattgatattctttactttatcacgtcttcgtggaaaagcgttctgttctggattttgacggcgttaattttgctgaatatggtccggatgcacttccgtttataccaaaatgtgtcgcgagaaaatattagtgatgcgatgactggactgtataatcgcaaaattttaacccctgaactggagcagcggttgcagaaactggtgcaatccggttcttcggtgatgtttattgcaattgacatggacaagttaaagcaaataaatgacaccctcggtcatcaggagggggatttagcgattacgttattagctcaggcgattaaacaatcgattcgtaaaagtgattatgccatccgactcggtggcgatgaattctgcatcattcttgtcgattcgacgccgcaaattgcagcacaactgcctgaacgtatcgaaaaacgtctgcaacatatcgcgccgcagaaagaaatcggcttctcttccggtatttacgcgatgaaagaaaacgatacgttacatgatgcgtataaagcttccgatgagcgtttatatgtcaataagcagaacaaaaacagccgttcatgataaccttctgtggttgtttgcttgtaatctcaggagcgtgaaatgactgaaatggctaaaggaagcgtgacgcatcagcggttaatcgctttattatcacaagaaggtgctaacttccgcgtcgttacccatgaagcggtaggtaaatgtgaagcggtgtcagaaattcgtggcaccgctctaggccagggtgctaaggcactggtatgtaaagtcaaaggcaatggcgtaaatcaacatgttctggcgatcctcgctgccgatcaacaggccgatctgagccaactcgccagccatataggcggattacgcgcttcgttggccagcccggcggaagtcgatgaactcacaggctgtgtcttcggcgcgatcccccctttcagcttccatccaaaactcaaactggttgccgaccctctactcttcgaacgatttgatgaaatcgccttcaatgcagggatgctggataaatccgttattttgaaaaccacggattatttgcgcattgcgcaaccagaactgctcaatttccgccgcactgcgtaactagcctgtccgttcaataagcagaacggacaaaaccagcacaacagcaatggcaaaaaacgatgacgtgataatcagtgtctcgacgaacatttgatcgttcatagcatgcccccgggagatagctgttttcacgttattgttagcgtgcacaaatggcagtttgatgacagttcgcctgattttttatgcaaaaaacgtaaagattttctacttccttcctgcagcaagcgtaaagtaagcaggcttattattttttggcaaggaaaccacgatgtttgatgtcactttgctgatcctgctcgggttagctgcgctgggctttatcagtcataacaccactgtcgccgcttcaattctggtgttgatcattgtccgcgtcacaccgttaagcacctttttcccgtggattgaaaaacaggggctaagtatcgggataatcattctgacgattggcgttatggcccccatcgccagcgggacgctaccgccctcaaccttgattcactcgtttctgaactggaaatcgctggtggcaattgcagtaggcgttattgtctcctggctgggtgggcgcggcgtgaccttaatgggcagccagccgcaactggtcgccgggctgctggtaggcactgttttaggcgtggcgctgtttcgcggcgtaccggtcggcccgcttattgccgcgggtctggtttcgctgattgtggggaaacagtagttaatcccgcaatatatcggcctggcgtttgccccaggcctttcttaaacatagtaataaaggccgttgttgaatcataccccagcgtatgagcaactttctgtacagtatcgcctttcactaatccctgaagtgccataatcagctgtaactgctgacgccactggcgaaaactcaaccccgtctcttttactatcagtcgcgcaagattgcgttcactcatcgcaaaaaagccagcccattgccctaatgacccccactcgacgggccctttcgccatcatctccaccatcgtgcggattttaggatgagaagaaacgggcaggtgcagctgttgttgtggctgctgagggagttcatcaaacaggacctgaattaatctgcgggtcatcggctcagcacgctgagtcgtcgtcctgtttgccagggttaaaatcaattcccggcataagggcgatattttcaatgtgcaacatgttgtcggcattgtcactgcgctgggttcgataaacagaaaacagagttcagcgttagctgtcacttgattgctatgttccaccccgcccggtatccaaaccgcatattgcggcggcaccatccacaaagcattttccaccgtacaggtaattgcaccatgtaatgctagtatcagctgtcctttgcggtgctgatgtacaggactggttaactcatccgttccggcgtgaatacaaaatgcgaccgcggcttcatggtgtcggtcgggttcatagccattgagattcaacctgtgcatcattttgtccgaatttagcgataatttgtcattttagcttgattcaacataacaataaaaacggtaaggtacagcctcgtttgtaacaatgagaagcatatgacctgttcaacttcattaagcggcaaaaacaggattgtccttatcgctggcattctgatgattgccacaacattacgcgtcacctttaccggcgcagcgccgttactggatacgattcgttccgcttactcgctgacgacagcgcaaaccggcttattaaccaccctgccattattggcctttgcgctaatctcacctttggctgccccggtggcgcgacgttttggtatggaacgtagcctgtttgccgcgttacttttgatctgtgcaggtatcgcaattcgttctctcccttcgccttacttattatttggcggtacagcggtcattggcggtgggattgcattaggcaatgtcttactgccaggattaattaaacgcgatttccctcattccgtcgccagacttaccggcgcatattccctgacaatgggagctgcagcggcactgggatcggctatggtcgtgccgctggctttgaacggttttggctggcaaggcgcgttgttcatgctgatgtgttttcctctgctggctctttttttatggctgccacagtggcgaagccaacaacatgcaaatttgagtacctcgcgcgccttacatactcggggtatctggcgttcgccgcttgcctggcaggtcacattgtttcttgggatcaactcactggtctattacgtgattattggctggcttccggcgatcctcatcagtcgcggctatagcgaagcacaggcgggttcactgcatggtttgctgcaactagccacagcagctcccggtttgctgatccctcttttcttacatcatgtgaaagatcagcgtggtattgcagcgttcgttgccttgatgtgcgcagtgggcgctgttgggctctgctttatgccagcgcacgcgatcacctggactctgcttttcggttttggttccggcgcaacaatgatactggggttgacgttcattggtcttcgggcaagttctgcgcatcaggcggcggcactctcggggatggcacaatccgtcgggtatttgctggcagcctgtgggccgccgctgatgggtaaaatacacgatgctaacggtgactggtccgtaccactgatgggtgttgccatactttcactactgatggcgattttcggactttgcgccgggagagacaaagaaattcgctaatatccggtgctatagtgacgtgacaaatcatgcgtgaaagggagaacaaacacgatgaatattcagtgcaaacgcgtttatgatccggctgaacagagcgatggttatcgcgtactggtcgaccgcctctggccgcgcggtatcaaaaaaccgatttagcccttgatgagtgggataaagaaatcacgccgtcaacggaactgcgcaaagcctttcacggcgaagtcgtcgattttgcaacctttcgcgagcaatatcttgcagaactggcgcaacacgagcaagaaggaaagcggctggcggacatcgccaaaaaacagccgctgaccctgctctacgcagcaaaaaacaccacgcagaaccatgcgctggtgctggccgactggctacgtagcttgtgattttagtacagcatccggcggttatttttcaccagccggatggtcccgtcgccacaatgcccattcatcaatcgtttcaccgcccggtaatttgcaattgttgctgaccccttgcgctgtctgcactggaatgagcgtcccgcccttctgctggcaatagaccgacgccggatttgccataccaatctgcggcggtttaggtgcttctggctgagaagaggttgaacaaccagccaggaccagcaagcaaggcaaagcaaaactgataattttcatttattgatctcacacatttatctacgcttagagtatcgcggtatcgttttgttttgcagcactatttttattacattcactcaaaacatattacgtcttgtttcatctttgttgatgatgttttatcatgcctgcaaagattaaataatcagcatttacccgccgtatcctggagttgtttcgtgtcagatcagattatcgcccgcgtctcgcaatcccttgccaaagaacagtcactggaaagtctggtccgacagcttctggagatgctggaaatggtcactgatatggaatcaacctacctgaccaaagtggatgtcgaagcgcgcctgcagcatattatgtttgcccgtaacagccagaaaatgcacatcccggagaattttaccgtctcgtgggattactcgttatgcaaacgcgctattgatgaaaactgctttttcagcgatgaagtccctgaccgttggggcgactgtattgcggcacgcaatcttggaatcaccacatttctgagtacaccaattcacttaccggatggatcattctatggcacgctttgcgccgccagcagtgagaagcgccagtggagtgaacgcgcggaacaggttttacagttattcgccggactgattgcacaatatattcaaaaagaggcgttggttgaacagctgcgcgaagccaatgccgcgctgattgcgcaatcgtataccgactcgttaaccgggctaccgaatcggcgggcgatttttgaaaatctgacgacgctgttttctctcgcccggcatcttaaccataagataatgatcgcgtttatcgatctggataacttcaaattaatcaatgaccgttttggtcataatagtggcgatctgtttctcattcaggttggcgagcgccttaatacgctccagcaaaatggcgaagttattggtcgtctcggcggtgatgagtttttggttgtttcactaaacaacgagaatgcggatatttcgtcgctgcgagaacgtattcaacagcaaatacgtggagaatatcacttaggtgatgttgatttgtattatcccggtgccagtcttggcatagtagaagtcgatcctgatacaaccgatgcagacagtgccctgcatgctgccgatattgcgatgtatcaggagaaaaaacacaaacagaaaacaccttttgtcgcgcatccagcgctacattcctgaggcgtattcacatccttttgattggtgataacatgcgaatcggtattatttttccggttgtaatctttattacagcggtcgtatttttagcatggttttttattggcggctatgctgccccgggagcataaagatgaaaaaaacaacgattattatgatgggtgtggcgattattgtcgttctcggcactgagctgggatggtggtaacgtcacctctaaaaatagcaaaggctgcctgtgtgcagcctttgtgcaatttaagcgttaacttttaatcttcctgtagataaatagcacgacaatcgcaccaataacggcaaccacgaagctgccaaaattgaagccatcgactttaccaaagccaaacagtgtgctgatccatccgccgactacggcaccgactatccccagcagaatagtcataaagaatccaccaccatctttacctggcatgatccacttcgccagaataccggcaataagcccaaaaataatccatgacagaatgcccattgtttcctcacttatctgttttgcattagcgggttagtcgctgataaaaagcatagcacaacatcgggagggcaagatttgtgacgagcatcacggaggattttttgcgatggcgcagaaattgcgccatcaacgatcggtgataattaccaaccacaaacatcatgttcgttttccgtgtcttgacatcctccacgccctgaatgacgaggatccctgctacgttcaggctgtcgcctgaatcatttcggtgggttcctgcttcaacgagcggcctgactgcaccatctctccacaggcaagaacggcgtgccccgccgctaaaatgttacgagcgccgtttacatcggcgttcgctgtatatccacatacctggcatctgaattgactttgtgacaggcgattttctttcgctgtatgaccacagcacgcgcaacgctggcttgtgtacgctggcggaacagcaagcacctgaccgccactccagagctgcttgtactcaagctggcggcgcatttcataccagccctgatccagtatcgaacggtttaaacctgattttgcccggacattgcgccccggctggctgaccgtacccgctgctgactttgacatgttgctgaccttcaaatcctcaatgactatcattgcgtggtttttgctgacggtcgttgtgactttatgaaggtagtccctgcggatatttgcgatacgggaatgcagtcgctgtattttgcgtttctgcttctgccagttattgctgaatttgaccttgcggcttaactgtcgctgaagtctcgccagcgtcttctggtttttctgaaaactgtttacaggcccaaagactgtgccatctgacagcgtggcgagtttagccacgccagcatccagcccgatcattgatgctgaagggtgaaccggagttgatacttcactttctgtctgaatactgatgtaccacttaccgcaggactggctgaccgtgacatttttcacaacacccgtgacctgacggctattccggtagcgcatccagcccagtttcggcagaaaaatacggctgttttcctgatcgagctttacgccctgcgggtagcggaatgcatcattctgtccccgctttttgaatcggggaaaagcagcccgcttccggaagaagtttttgtaagcccgctcaaggtctttcagtgactgttgcaatggctgtgagggcgaatctttaagccattgcgtttcagtggcgtttttccactcaaccagccaggaagccattttcccgtaagggatgtatttattaccggcctcatgattctcattctgacgtgccagagcacgattgaaaacgaaacgacatgcgcctgcgaagcgcctcatttcacactcctgttgaccacctggtcttaactggaatttaaatgcctgtaatcgtttcacaggtcaaatgatactttggtctgtgaaaaaagaaaccgatatccggcgtggaaggcattgtgttttcctgatgcatgttcacctggtctttgtcaccagataccgactccagatttttgaccatgacgcgacagaaaaactacgcacttacttttcaaatgtatgtgctgattttgaagctgaacttgttgaaatggatggcgaaccagatcacgtccatttgttaattaactatcctcccaaactggcgatatccagtctggtaaacagcctcaaaggcgtatcgggtaggttactgcgacgagatcgaccagatattgcagtcaggtattactacaaaggcgttttgtggagtcctggctattttgccagtagctgcggaggtgcgccaatatccgtcatccgccaatacattgaacaacagcaaacacctggtcaggtggaaaaccgcgccttatatccccgccctgaaggacggggttttacggcgcaccggataagaacgcacggtattcaccagatcttttatcacttcagccgccacttctggcaccagcaaagtcatcggcgtctctgtttcataatcgacagaaacgccattgctgttattggtgacggtcacggtatacgttgctttgcccatgattcatttcccgttatgaatgactttccgttgttgcgcaccttccatcaggacttcaggagccacgaagaagtcaatgttgaaataagtatcgtcagtcatggcttcaatgttgtgccacttttctggagggaacaccgcaaactgccccgcttcgataaggatcacctgatcaggctctgcactgtgttcatcagcgtagccgagatatttgaccgccccatgcataacggaaaggcgtgggtaaacccccgggcgcgttcctttatcaagatgacgttcgaatattccggcaggcgcagtttgtttattccagaaaggcgttgagcgcgtatgaatataattctgtaggatttgcagcatcctattccctccttcggggaatgcgctgaaaacggtttattccagccgtttcagggtacgcctgataatttgcattttaaataccatttattggttactttttagcaccatatcagagaaaaatcagggaggattacaagtgggaagcccgcgacaacgcgggctgaatgtatcaggattgcagcgtcgccagtcgggcggcgaaacccacgaacatcaaaccaatcagtgagttgccaactttagccagtttctttttggtacgtatgtactgcgtgacaaaagcaccagaaataatcaggaagctcaaatagcagaaactcaccagttccagcgtcgtcgccagaataaagaatgaaattcccgtatgtggggcattaacatcgataaactgtacgaaaaacgacacatagaacaaaatggctttcggattagtcaggctcaaaattaacgcgcgtttaaaaatggccccgtattggggctcatcggatttggcctcgttatttttacccttcagggtcgcgtagagaattttactccccagatagagcaaataaaacgcaccaagataacgtacaatgttgaataatatcggggtggtcttaattaatgtcgccactccagcccatgccagaaacatcaatactgcatcgccaataaatacaccgcaggccgcaagataaccgcctttcataccgctactgacgctatttttgagtacaaacagggtatttggccctggcaccaacacaataaaaatggccccaaccagataggtccagtaattcagaaccccgtattcagcgaacacattaacctctttaattatctttcgatcatgcgcgattaaaggtgaatatgctaaccaatctgtagcggcttagaaaggagaaaatcaggttttaacccgatatcaacccgataattgaatcattaatcaggcatgctccagtgaaaaattcgggtagtgctcggcaaaatactggcgtaaaaattctaccgttatccgcactttcgctgacgtcgccagccttgaaacataaacggcccagacgttcgctggctggtaatattccggtagcacttgcactaaatgaccactggcaatgttttcgctaacatcccaccaggagcgcagagcaatcccctgcccatcgagacaccactgatggacaatttctccatgattagacgacagtgggccggtgactttaatcgcatggtggccttctttattgcgtaattgccagacaccaaaaggatgatcgcgctctttaatgaccaggcacggcaatgcggaaagatcggttaaatgtttcggcacgccatgttgcgcaataaattccggcgacgcgcagagaatgcggtaattagtcgccagtttgcgggcgattaaattaggggcgatgtcatcgccaatgcgaatatcgagatcaacaccttcattgaccaaatcgaccaaccggtcttccacatcaaaacgtaattccagttgcggatacgccttagccagcgctgataacgccggagccaccacctgtcgtccaaaaccaaagctgctgataatacgcagcatcccctgcggcacctgacgcacgtcagaaagttcgtccatcatctgaccgacatcctgcaaaatccgctgcgcccattcataaatccgctctccttcttcggtaatggtgacgcggcgggtggtgcggtgtaacaacaccacgtttagcgtttgctccagcaaggcgatgcgcttgctgacgaacgccggtgaaacgcccagttcttccgccacggcggcaaaaccagcccgacgagccaccagcataaagacgcgcaaatcattcagcagcggtaaattattcatgattcgtgttttatgtttcaccagttacggggattaattccttttcagtcaattataggatggtgatgttgtcaattttgatggtcaggaagtgagaacccaatgatgaaaacgatgcgtattgctgcgatcccgggagacgggattggcaaagaagtccttcctgaagggattcgcgtgttacaggctgccgctgagcgctggggcttcgccttgagttttgagcaaatggagtgggcgagctgcgagtattacagccatcacggtaaaatgatgccggacgactggcatgagcaacttagccgtttcgacgccatctattttggtgccgtcggctggccggacaccgttcctgaccatatttcgttgtggggttcgctgctgaaatttcgtcgtgaattcgaccagtacgtcaacctgcgcccggttcgtctctttcctggcgttccctgcccgctggcgggaaaacagccaggcgacatcgatttttacgtggtcagggaaaacaccgaaggcgaatattcctcgctcggcggtagagtgaatgaaggtacagagcatgaagtcgtcattcaggaatcggtatttacgcgtcgtggtgtcgatcgcattttgcgttatgccttcgaacttgcgcaaagccgcccacgtaagacgctaacttctgccactaaatcaaacggtttagccatcagcatgccgtactgggatgagcgagtggaagcaatggccgagaattacccggagatccgctgggacaagcagcatattgatattctctgcgcgcgttttgtgatgcagccggaacgcttcgatgtggtggtggcgtccaatttatttggcgatatcctttccgatcttggcccggcctgcaccggcaccattggcattgccccatccgccaacctgaatccggaacgcactttcccgtcgctcttcgagccagtccacggttccgcgccggatatctacgggaaaaacattgctaaccctatcgccacgatttgggccggtgcaatgatgctcgattttctcggcaatggcgatgagcgtttccagcaagcgcataacggtattctggctgcaattgaagaagtgattgctcacgggccgaaaacacctgatatgaaaggcaatgccaccacgccacaggttgccgacgcgatttgcaaaattattttgcgttaaggtcaaaccagtttatttgaaccgcgtcactgacgcggtttttttattcgttctttgcagtaaataacctgcgtcatttcaccttttattgtttccgtttcgtgttttatggctttccgtattcttaattgtttaatttatgtaacatgcaaataatcaatttgttaaacacaacatacaactcattaccctgcaaataattacaactggcaaaagccagagacgggcttttatgcccaggagatgactcatgatgagcaatgttaagaaaaaagatgtgccgctgataagcatcagcctggtggccattcttttcatcgcagctgcattaagccttttcccacaacaatcggccgacgcggccaacgcaatatacacttttgttacgcgtacgttaggttccgccgtacaggtattggttttgctggcaatgggactggtgatttatttagccaccagtaaatacggcaatattcgtcttggcgaaggaaaaccggaatacagcacgctctcctggctgtttatgtttatttgtgccggtttaggttcttctacgctttattggggggttgctgaatgggcctattattatcaaacgcctggattaaatatcgcaccgcgttcacaacaggcactcgaatttagcgtcccttactccttcttccactggggcatcagcgcctggcaacttatacgctggcctcattaatcatggcttatcactttcatgtgcgtaaaaacaaaggtctgagtctttccggcattattgccgcgattaccggcgttcgcccgcaaggcccatggggaaaactggttgatttgatgttcctgatcgccactgtcggcgcactgactatttcccttgttgtcaccgcagcaacctttactcgtggactttccgcgctgaccggtttacccgataacttcaccgtgcaggcatttgtgatcctgctttccggcggcattttttgcctaagctcgtggattggtatcaacaacggtttgcaacgtctgagcaaaatggttggctggggcgcgttcctgctgccattactggtgctgattgtcggcccaaccgaatttattaccaacagcatcatcaatgccatcggtctgaccacgcaaaacttcctgcaaatgagcttattcaccgatccgcttggcgatggttcatttacccgcaactggaccgttttctactggctgtggtggatctcatacacccctggcgtagcaatgtttgtcacccgcgtttcccgcggtcgtaagattaaagaagttatctggggactgatcctcggcagcaccgtcggttgctggttcttcttcggcgtaatggaaagctatgccattcatcagtttatcaatggcgtaatcaacgtcccacaggtgctggaaacactgggcggcgaaacagctgtacagcaagttctgatgtcgttgccagccggtaaattgttcctcgccgcatacctgggcgtgatgattattttccttgcctcgcatatggatgcggtggcctacaccatggctgcgaccagtacgcgtaatctccaggaaggtgacgatcctgaccgtgggctgcgtcttttctggtgcgtggtgatcactctgatcccgctttccatcttgtttaccggtgcttcgctggaaacgatgaaaaccaccgtcgtgctcacagcccttcccttcctcgtcattttactggtgaaagtcggcggatttattcgctggctgaaacaggattacgccgacattccggctcatcaagttgaacattatctcccgcagacaccggttgaagccctggaaaaaacgccagtgctccctgcgggaaccgtattcaaaggcgacaactgagcgccatcatcctaacgataaaggtatccctatgagcaatctgagccctgactttgtactacccgaaaatttttgcgctaacccgcaagaggcgtggaccattcctgcccgtttttataccgatcagaacgcgtttgaacacgaaaaagagaacgtcttcgccaaaagctggatttgcgtcgctcacagcagcgaactggcgaatgccaatgattatgtgacgcgtgagatcattggcgaaagcatcgtgctggtacgcggtcgtgataaggttttgcgcgcgttctataacgtgtgtccgcaccgtggtcatcagttgttgagcggtgaaggaaaagcaaaaaatgtgattacctgcccgtatcacgcatgggcattcaaactcgatggcaatctggcccatgcacgtaactgcgaaaacgtcgccaatttcgatagcgacaaagcgcaactggttccggtgcgtctggaagaatatgccggattcgtcttcatcaacatggaccccaacgccaccagcgtagaagatcagttacccggtctgggcgcgaaagtgctggaagcctgcccggaagtccacgatctgaaactggcggcccgctttaccacccgcacgcctgccaactggaagaacattgtcgataactatctcgagtgctatcactgtggtccggcgcatccaggtttctccgactccgtacaggttgatcgttactggcacaccatgcacggtaactggacgctgcaatacggtttcgccaaaccgtccgaacagtcgtttaaatttgaagagggtacggatgcggcattccacggtttctggctgtggccgtgcacgatgctgaacgtcaccccgatcaaagggatgatgacggtcatttatgaattcccggtggattctgaaactaccctgcaaaactacgatatttacttcaccaatgaagagttaaccgacgagcaaaaatcgctgattgagtggtatcgcgatgtgttccgtccggaagatttacgtctggttgaaagcgtacagaaagggctgaaatcgcgtggctatcgtggtcaggggcgcatcatggccgacagtagcggtagtggcatttccgaacatggtatcgcccatttccataatctgctggcgcaggtgtttaaggactaatgacatcggcggcggtattttccgccgctgggctgatttttgatggagtacagcaatgtcagactatcaaatgtttgaagtacaggtgagtcaggtggaaccgcttaccgaacaggtgaaacgcttcacgctggtggcaaccgatggcaaaccgctgcctgcgttcaccggaggaagtcacatcattgtgcagatgagcgatggtgataaccagtacagcaatgcgtattcactactgagttcgccgcatgacacctcttgttatcagattgccgttcggctggaggaaaactcgcgcggcggttcccgctttttgcatcagcaggtaaaagtgggcgatcggttaacgatttcaacgcctaataacctgtttgcgctaattccctcagccagaaagcatctgtttatcgcgggcggtattggtatcacccctttcctgtcgcacatggcagagctgcaacacagcgacgtcgactggcagctacattactgctcgcgaaatccagaaagttgcgcatttcgtgatgagctagtccagcatccgcaggctgagaaagttcacttgcatcactcatcaaccggaacacgactggaattagcgcgattattggcggatatcgaacctggcacacacgtttatacctgtggtcccgaggcgctaaatgaagcggtaagaagtgaagctgcgcgtctggacatcgtcgccgatacgctgcactttgagcaatttgctatcgaagacaaaaccggcgatgcctttaccctggtgcttgcccgttccggaaaagagtttgtggtgccggaagagatgactattttgcaggttattgaaaataataaagccgcgaaagtggaatgtttatgtcgtgaaggggtatgcggaacctgcgaaacagcaatactggaaggtgaagctgaccatcgggatcagtattttagcgatgaagagcgtgccagccagcaaagtatgttgatctgttgttcgcgtgcgaagggtaaacgcctggtgttggatttgtagtttgccaaagccggatgtggcgctgagcgcgcccagtccggcttcggaagattttactgcggatattcctgcaataaattgtgtaatgcttccgccatcagctcaccacgccagccggaaatcagctccggcaaattgttctgcggtttcagtttccagtgccagttcagcagttggttgatttgccgacgcgatgccagcaattcggcgctgatcttatgcgtttcgctcacgtcagtaatcagcgacttaatcgctttaaacgctttacgataacccggcatgtccatcaggttaagcatcggctgcggtaaggcctcttccggcaatgtctgcgctttttccaccagcgccagcagcgttttaccgtgaaagcggatttcgctaccggataaacccaggctgtccagttcgcctaaacttcccggcatataacgcgctaccgaccacaaatgctcttcacgcacgacaaagttcaccgccagatcgcgctctcgcgccttgcgcagtcgccagtcggctaacagttgcagacaggccagttggcgtgtgcgtaattgccaggcattggtgatatcacgccaggcatcttccggcgcaacgacttcctgacgacgcatttgcatcaggcggcattcatccagcgccgcaggtagccagccggaggcctccgtttctaccataagcttggcggtgatcggtaacagataccagacatccgccgctgcgtattcacactgacgttcggtcagcggtctggccagccagtcggtgcgcgattcactcttgtccagcgtaacgccggaatactcttccaccatggaagcgaaaccccatgacatcgggcgtccgcagaaggcagcaaggatttgcgtgtcaatcaagggttgtggtaattcgccaaagacattgaggaacacttccagatcttcactgcctgcatggagaaattttgtgatggacggatcgcgcaggatcgctttcagcggtgaccagtcggtgatcccgagaggatcaattagcgccagatgctcgccatcgaaaagttgaatcaaccccagctgcgggtaataagtgcgcgtacgaacaaattcagtatccagggctatcgccggaaaggcacggacggcttcacacaaagaagccagcgcatcgtccgtggtaatcatttggtaattcaaattgttttctctttagtgggcgtcaaaaaaaacgccggattaaccggcgtctgacgactgacttaacactcaggctttattgtccactttgccgcgcgcttcgtcacgtaattctcgtcgcaaaatttttccgacgttagatttcggtaactcatcacgaaactccaccagcttcggtactttgtagcccgtgagctgacggcggcaaaaggtcaccagtgactcttcggtaagcgatggatcttttttcactacgaagattttcaccgcttcaccactggagccggaaggtacgccaacagccgcgacttcctgtacgccaggatgctgcatgacgacatcttcaatctcgttgggatagacgttaaaaccggaaaccagaatcatgtcttttttacgatcgacaatgcgcaggaacccttcttcatccatcaccgcgatgtcgccggtgtgtaaccagccatttttgatgatctcatctgtagcatccggacgctgccagtaacccagcatcacctgcggtcctttgacacaaagctcacccggttgacccggtggtacttcattatcatcatcatccaccagtttggcttccgtcgacggcaccggcaaaccgatgctaccactatgataatcaatatcatatgggttaacgctgaccagcggcgcacactcggtaaggccatagccttccagcagatactgtcctgtcagtttcacccaacgctctgccaccacttgctgcactggcatccctccgcctgcggaaagatgcagactggagaaatccagctgctggaactctttattgttcagcaacgcattgaacaaggtgttaacgcccgtgatagcggtaaacggatatttcgctaactcttttaccaacctggaatatcgcgcgggttagtgataagcaggttctgcccacccagttcgataaacagcaggcagttaatggtcagggcaaaaatgtgatacagcggcagtgccgttactaccagttctttacctggatgcagcaacggcccataggtggcgttgacctgttccaggttcgccagcatattgcggtgagtcagcatcgcgcctttcgccacacctgtggtgccgccggtgtattgcaggaaggctaaatcttccggcaccagttcgggtttgacgtactgcatccggtagccgttatgcagtgcgctacgaaatgaaatggcatctggcagatggtatttcggcaccaaacgcttgatgtatttaacaacgaaattgactaccgtgccttttgccgtagatagctgatcgcccatacgggtcagaattacgtgctgaacggcggttttatcaaccactttttccagtgtgtgagcaaagttagacacgataacaatcgccgatgcgccgctatcgttaagctgatgctcaagctcacgcggggtatacaacgggttaacgtttacgacgatcatccctgcacgcaaaatgccaaacagcgccaccggatattgcaataaattaggcatcatcaacgcaacgcgatcgcctttcttcagccccaacccttgttgcaaataagcggcaaacgcgcgactgcgttcttccagcttgcggaaggtcatcacctcccccatattcacaaacgcaggctgatcggcgtagcgcgcgaccgactgctcaaacatatctaccagagattgataacggtcagggttgatctccgtcggaacgtccgcgggataacggttaagccaaaccttcttcaattcttcacctctaaaatgcgtgttcgtcgtcatcgcaaccccaaatgatatacatgccgttaacataatattaactcatcataccagcttgataattacccaacgaaaaggttgcgaagcgcgtcactatttatttttatctttaccgtaagaatgcagaaacagcggaccagccgctgtttctttttctttaaaaacaagcaattattcagttacaactgtttgtactctcgcgggaccgggattataccagccccatccgccgtagccatagggccagccacgaccgccataaaaccatggatcaatcggctgaggcggcataatcacctgctgggttaaatgccaacgtttgtaacccgttacttgcatcaccataaatttatagggcgtgttgccgatttttccgtcaaccgcaccagtgattggcccgactaccgtaaccagttgtccacggaaatccaccgggtccagaaaaccgttcatatcggcataaatgcgaccgcgagaaggttctcccagcgtcggtctggctccgctgtccagcggtacggtagcaatttccaggcgggttttcccttgctggttttgtaccgcaaccactttgccaccaaagcgtgcctcctgaccaacgtacagctgcggcgcactcatcacccgaactaaatcttgttgcggcgtgggactgctgcctttaatggcgtccggcacagtgacacaaccgctcagcattagcgcaaacgtacctgccagtatgcctttgataacattcttttgaaccgccatgatgcgactcctttttttctcagggcatactcttaagattcattctttgcccggaagtttcttccatgcgacgttgttacgcaaataaaccggctcggcatgttccaccgccaccgttttaccctcggcaaatatctgacaagcaatcggcagcatatcttctgcagcgggcagtaacacttcgccatcgcgcaaaaccagcccgctctctttaccgagatccggccaggcttgccagcccgtccctaccgtcacccattcgccggaaagctgttgcattcgttcatggacgatttcgggtttgagtacggcttcggtttcttcaccgtgccagataccgttttcatcacgctgatattcggcccagtaaacttcgcccattcgcgcgtcaatggctgccagcacacgggttgcgccgtttttgcgccacgccccttgcgccatcgtcattagcgtggagacgccaatcatcggtagctctgcgccaagtgccagcccttgcgcaatgccaataccaatgcgcacgccggtaaagctaccggggccgcgcccgtaagccagagcgttaatatcagtcagggaagttccgctggtggtcaggatatcctgcaccatcggtaagattcgttgagtatgttcacgagggcaaagctcaaaatgagcgttgacagtaccgtcgttccacagggcgacagagcaggcctctgtcgcggtatcgatagccagaattcgcatgggtcttcgtgcttagatcaataaaaaggcgcgcatcataccatactccgtaacaaattacctggaggatggtatcgcaaggaaacgaaccgcacgggcaatgtcacgagtgcgtggcgcgggcggcagactggcgagaaacgtcgcgccgtaaggacgcatcaccagccgattgtcacaaatcaccagcacgccacgatcgtcggcgtcgcgaatcagtcgccctaccccctgtttgagagtaatgacggcatctggtagttgcacttcatcgaacgggtcgccaccgcgcaaacgacaatcttccatgcgcgcttttaacagtggatcatccggcgaggtaaacggcaacttgtcgataatcaccaatgacaatgtatcgccacgcacgtccaccccttcccagaaactactggttgccacaagaagcgcgttaccggcgctgacaaattgctgcaacagttgccctttgctggtttccccctgcaacaaaacgggaagcgtcatggtagcgcggaactgctcggccagatcgcgcatcatggcgtgcgaggtacaaagcataaaacaacgaccgttgttagcttcgatgatcggtcgcagcattgccgctaactggcgagcagaacctggctggttggtttgcggcagattgcgcggcacacagagtaacgcctggcggctgtaatcaaacgggcttggcaatagcaacgactccgcctgttctatcccaagccgcgaggtgaaatgatgcagatcgtcgttcaccgacagcgttgctgaggtgaagatccagctaccaggcttttgcgccattaactctttgaatttatccgccacgctgagcggcgtgagagccagagtaaaatggcgcgaagtgcattcgtaccaatagctgtagcccggctgattgatctcttttagccgcttcagccgtgtgcgatacaacgtagcgcgctcaaatgccgcatccagcaaggcggaacgccccagtgacagtttcgccacgtcataacaaagttccagggtgtcatcgagcagtaaaaatgcccgctgaatttgcggattagctaacagctcacgcaggttaccgcgataacctggctcaccgagttgcagacgaaaatcctgcgcactctgggcaagacgatcagcgcacttttgtaactgctgggtgtcttttaattcggtgcggtaagcgatggtgatgtcttttgccaggtcgagcagttgtcgactggagagtgactgaccaaaatactggctggcaatgtccggtagctggtgggcttcgtcgaagatcatgacgtccgcttccgggatcagttcgccaaatccactctctttaaccaccatatccgccagaaagagatgatggtttaccaccaccacatcggcgtccatcgcttttttacgtgctttgaccacaaagcaatctttatacatcgggcagtcgctgccaagacagttgtcgttggtgctggtgaccagcggccacgcctgtgaatcttccgccacgctgacgcaggtgctgatatcaccatcgactgtttgattagaccaggagcgcagcaggatcacatcgcttaagatttgtaccggcagatcgccccccgccagcgcctgctgttcgagacgctcgaggcagaggtagtttgagcgccctttcagcagcgccacgttgcccgtatatttcaatgcctttgagactgttggcaaatcgcggctgtagagctgatcctgcaacgcttttgagccggtcgagataatgactttctttttcgcccgcagcgcaggagccaggtaagcgtaggttttgcccgtaccggttcctgcttccaccaccagcggctggcctttttctatcgcctgggtgacggctaccgccatctgtcgctgtggttctcgcggcttaaagcctggtatcgctttcgccagctgaccgtctggtgcaaaatcgtccgtcacactaccccctgttgatttgaacagggattatgtcaggatgagggcgctttcgccagttgaagtggtgacggcgacctcacattgtggcagtctttgcagcacgaaaatggaaggataatgaggacaaaatgatgactatcgttcgtatcgatgctgaagcccgctggtctgatgtggtaatccacaacaacacgctctactacactggtgtaccggaaaacctcgacgccgatgcctttgagcaaaccgccaacacgctggcgcagattgatgccgtgctggaaaaacagggcagcaataaatcgagcattctggatgccaccattttcctggccgataaaaacgacttcgcggcgatgaataaagcgtgggatgcctgggttgtcgcgggtcatgcgccggtgcgctgcacggtacaagcgggtttgatgaacccgaagtataaagttgaaattaagattgtggctgcggtgtaagctttatcgaagcaaaataagtcagacgataatttatcgataatactggtcggttttacataaatcgaccagagattaagatattacctgttgatgctcctgctaattcattatttatttttataatttcaattttatctataaaactaactatataaataaccataaccatgccgttgtgttcgccctctgactagcaactctggttttctttcttagctgaataatctggttatagcgtgaggactgaccgttaaatttctccatcttactggataacacaccatgagctgctacctttaaaacacctgaatgtcaacaggttaactcgtgccatatcgttataatccctttgatattagatgcaaattaaggtcatatatagtcttatcgataacatggttaattttaaggataagaatatgcctgctgtaatagataaagccctggatttcattggtgccatggatgtatcagcgccaacaccaagttcgatgaatgaaagcacggcgaagggaatctttaaatatttaaaagaactgggagtacccgcgagtgccgctgatattacggcgcgagctgaccaggaaggctggaaccctgggttcacggaaaaaatggttggatgggcaaaaaaaatggagtctggtgaacgcactgtaattaaaaatcctgaatacttttcaacatatatgcaggaagaactaaaagcactggtctgagcttaatttatatcagcataaatgggtcaggacgcttttaatcacatataaaaagcgtcctttttctcacaatcaaataatcatcggattctataacgaaatcgatacggattagtgtgttactcgtcttcatcctcaaaacgcgccacgattcgctcgccggagtggttggcacgcagctcttctgccaccagcgcgattgcctggccgctgctcatcccttgtgccatcagttcctggatccgctcgacagctttttgctgctgttcatgggtgagtgaaggtaaacctgcaaacattgttaactcctgctaaattgttggcgctaattatttcatgctacccggcacatagccagtagagtcaggactgatgaagacgttatctcccgctgtgattactttaccctggcgtcaggacgccgctgaattttatttctcccgcttaagccacctgccgtgggcgatgcttttacactccggctatgccgatcatccgtatagccgctttgatattgtggtcgccgatccgatttgcactttaaccactttcggtaaagaaaccgttgttagtgaaagcgaaaaacgcacaacgaccactgatgacccgctacaggtgctccagcaggtgctggatcgcgcagacattcgcccaacgcataacgaagatttgccatttcagggcggcgcactggggttgtttggctacgatctgggccgccgttttgagtcactgccagaaattgcggaacaagatatcgttctgccggatatggcagtgggtatctacgattgggcgctcattgtcgaccaccagcgtcatacagtttctttgctgagtcataatgatgtcaatgcccgtcgggcctggctggaaagccagcaattctcgccgcaggaagatttcacgctcacttccgactggcaatccaatatgacccgcgagcagtacggcgaaaaatttcgccaggtacaggaatatctgcacagcggtgattgctatcaggtgaatctcgcccagcgttttcatgcgacctattctggcgatgaatggcaggcattccttcagcttaatcaggccaaccgcgcgccatttagcgcttttttacgtcttgaacagggtgcaattttaagcctttcgccagagcggtttattctttgtgataatagtgaaatccagacccgcccgattaaaggcacgctaccacgcctgcccgatcctcaggaagatagcaaacaagcagaaaaactggcgaactcagcgaaagatcgtgccgaaaatctgatgattgtcgatttaatgcgtaatgatatcggtcgtgttgccgtagccggttcggtaaaagtaccagagctgttcgtggtggaacccttccctgccgtgcatcatctggtcagcactataacggcgcgactaccagaacagttacacgccagcgatctgctgcgcgcagcttttcctggtggctcaataaccggggctccgaaagtacgggctatggaaattatcgacgaactggaaccgcagcgacgtaatgcctggtgcggcagcattggctatttgagcttttgcggcaacatggataccagcattactatccgcacgctgactgccattaacggacaaatatactgctctgcgggcggtggaattgtcgccgatagccaggaagaagcggaatatcaggaaacttttgataaagttaataagatattacgccaactggagaagtaagacgtggaataccgtagcctgacgcttgatgattttttatctcgctttcaacttttgcgcccgcaaattaaccgggaaaccctaaatcatcgtcaggctgccgtgttaatccccatcgtccgtcgaccgcaaccggggttgttgctgactcagcgttcaattcatctgcgtaaacacgctggacaagtggcattccctggaggtgcagtcgatgacacggacgcatcagttatcgccgccgcgctgcgcgaagctgaagaagaggtcgctataccgccttccgccgttgaagttatcggcgtgctgccgcccgtcgatagcgtaactggctatcaggtaaccccagtggtcggcattatcccgcccgatctgccgtatcgcgccagtgaagatgaagtctcggcggtgtttgaaatgccgctcgcccaggcattacatctgggtcgttatcaccctttagatatctaccgccgtggcgattcacatcgggtatggctgtcctggtacgaacagtattttgtatggggaatgaccgcaggcataattcgtgagctggcgctgcaaattggtgtgaaaccctgactatacttatctttacatctacaaaacactacttgagacaatcatcgcaatattagttaaatcgcggtttttgattagtttaattcatgtgaatagttaagccagtcgccgcgttccctcttacactatgcgctgttattagttcgttactggaagtccagtcaccttgtcaggagtattatcgtgattagtctattcgacatgtttaaggtggggattggtccctcatcttcccataccgtagggcctatgaaggcgggtaaacagttcgtcgatgatctggtcgaaaaaggcttactggatagcgttactcgcgttgccgtggacgtttatggttcactgtcgctgacgggtaaaggccaccacaccgatatcgccattattatgggtcttgcaggtaacgaacctgccaccgtggatatcgacagtattcccggttttattcgcgacgtagaagagcgcgaacgtctgctgctggcacagggacggcatgaagtggatttcccgcgcgacaacgggatgcgttttcataacggcaacctgccgctgcatgaaaacggtatgcaaatccacgcctataacggcgatgaagtcgtctacagcaaaacttattattccatcggcggcggttttatcgtcgatgaagaacactttggtcaggatgctgccaacgaagtgagcgtgccgtatccgttcaaatctgccaccgaactgctcgcgtactgtaatgaaaccggctattcgctgtctggtctcgctatgcagaacgaactggcgctgcacagcaagaaagagatcgacgagtatttcgcgcatgtctggcaaaccatgcaggcatgtatcgatcgcgggatgaacaccgaaggtgtactgccaggcccgctgcgcgtgccacgtcgtgcgtctgccctgcgccggatgttagtttccagcgataaactgtctaacgatccgatgaatgtcattgactgggtaaacatgtttgcgctggcagttaacgaagaaaacgccgccggtggtcgtgtggtaactgcgccaaccaacggtgcctgcggtatcgttccggcagtgctggcttactatgaccactttattgaatcggtcagcccggacatctatacccgttactttatggcagcgggcgcgattggtgcattgtataaaatgaacgcctctatttccggtgcggaagttggttgccagggcgaagtgggtgttgcctgttcaatggctgctgcgggtcttgcagaactgctgggcggtagcccggaacaggtttgcgtggcggcggaaattggcatggaacacaaccttggtttaacctgcgacccggttgcagggcaggttcaggtgccgtgcattgagcgtaatgccattgcctctgtgaaggcgattaacgccgcacggatggctctgcgccgcaccagtgcaccgcgcgtctcgctggataaggtcatcgaaacgatgtacgaaaccggtaaggacatgaacgccaaataccgcgaaacctcacgcggtggtctggcaatcaaagtccagtgtgactaatacttcttactcgcccatctgcaacggatgggcgaatttatacccgctttctcgtctgctgtaatattccccactacacttccactgttgcgtcaggcgtttgtcgccatacgcttacagggtggcccgcatgcaaaaagcacaacggatcattaaaacctatcgccgtaatcgaatgattgtttgtacgatttgcgcactcgttacgctcgcttcgaccctgagcgtgcgatttatttcacagcgtaacttaaatcaacaacgggtagtacaattcgccaatcacgctgtagaggaattagataaagtactgcttcccctacaggcaggtagcgaagtcttgcttccgctgattggtctgccctgctctgtcgcccatttgccattacgtaaacaggcggcaaaactccaaactgtgcgatccattggcctggtgcaagacggcacactctattgctccagcatttttggttatcgcaatgtgcccgtcgtggacattctggctgaacttcctgcaccgcaaccacttttacgcctgacgatcgaccgtgccctgattaaaggcagtccggttttgattcaatggacgcctgcagcgggcagtagcaatgctggggtcatggagatgattaacatcgacttactgacggcaatgctccttgagccacaactgccgcaaatcagtagcgccagcctgacggtggacaaacggcatttgctctatggtaatgggctggtagattcccttccgcaacctgaagacaatgaaaactatcaggtttcttcgcaacgctttccttttaccattaacgttaatggtccgggggctacggcgctggcatggcactatcttccaacacaattaccgctggcggtgctgctaagtttactggtgggctacatcgcctggctggcgaccgcttaccggatgagcttttcccgcgaaatcaatctgggcctggcgcaacatgagttcgaattgttctgtcagcctttgcttaatgcgcgcagccagcaatgtattggtgtagagattttgctgcgctggaacaatccgcgtcagggctggatttcaccggatgtgtttattcctatcgcggaagaacatcatttaattgtgccactgacccgctatgtgatggcagaaaccattcgtcagcgccatgttttcccgatgagtagtcagtttcatgttggcattaacgtcgcacccagccattttcgccgtggtgtgctgataaaagatctcaatcagtactggtttagcgctcacccgattcagcaactgatcctcgaaatcaccgaacgcgatgccttactggatgttgattatcggattgcccgcgagctacatcgtaaaaacgtcaaactggcgattgatgacttcggcaccggcaacagttcattttcctggcttgaaacattacgtcctgacgtgctgaaaattgataagtcatttaccgcagctataggttctgacgcggttaactcgacggtgaccgatatcatcatcgcgctggggcaaagactgaatattgaactggtggcggagggcgtggaaacgcaagaacaggcgaagtatttgcgccgtcatggcgtgcatattttgcaagggtatttgtacgcacagccgatgccgctacgtgattttcccaaatggctggcgggcagccaaccgccgcccgcccggcataatggacatatcacgcccattatgccgttacgttaatgcttactcatcttcatcgtgcgccggttgctctttaacaatgcgaaccagatcaacacgataatcattggcttcaatgatggtgatatgcagtggccctacatcaatcacatcgcccacacggggaatgtgaccatttgccgagatcacgaggcccgcgaccgtcgcgatatcatcgtcatcggcaaggtgctcaacatcaagcgcctgctgcaaggcatgcaaatctgtaccgccttttaccagccagccgtcaccatcagtaatgatttccggcgtttcgtcagcgtccgggaattcacccgcaatggcttccagcacatccagcggcgtgaccagaccttgtaccacaccaaactcgttggtcacgataacaaagctcccgcgagcacgacgcagcacgcccaacaggttgatcggatcgagggtttccgggacgataatcgccggagacgccgaagcaatcgccgccacatcaacgccctcttccagcgccaccagcagttctttagcacgtacaataccaatgatttcatccagttcaccgcgacataccgggaacagactgtgcggtgaagagagcagttgctcgcggatttcatcgaccccgagattagcgtcaacccagcttatttcaccgcgcggcgtcatgatcccgcgcagagaacgcgacgccagcgtcagtacgccgttaatcatgtaacgttcttcttcggcaaatgcaccttccgggatcggcatcggcatcgggttatcggcatcgtgctgaacattggcctgacgtttcccgcccatcaaacgcaggatggcatcggcagtacgcgctcgcagcggcaaagtcgactggtggcgaataaagttgcgacgcgcaatctggttaaacacttcgatgatgatcgagaagccaatcgcggcatacaggtaacctttcggaatgtggaaaccgaaaccttctgccaccagactcagaccaatcattaacaggaagctcagacagagcaccaccaccgtggggtgctggttaacgaatcgcgtcagcggtttggatgccagcaacataaccgccatcgcaatcactaccgccgccatcatcaccggcagatggttaaccatccctactgcagtaattaccgcatccaacgagaagacggcgtcaaggatgacaatctgtgtgacgaccacccagaaactggcgtagcctttaccgtggccggaatcatgatcgcggttttccagccgttcatgcagttcggttgttgctttgaacagcaagaatatccccccgaacaacataatcaggtcgcgtccggagaaggagaaatccatgacggtaaatagcggtttggtcagcgtgaccatccatgaaatcagcgacagcagccccagacgcataatcagcgccagtgataaccccagcaaacgcgctttatcgcgttgttttggcggcagtttgtcagcaagaatggcgatgaagaccaggttatcgatacccagcacaatttcgagaacaacaagcgtgagtagccccgcccaaattgaggggtccattaagaattccatgacaagctcctgcttaaggaatagctattcgacgccagaaataatgcaggcgtaacgacaaaatgcaaacgaaaggtgcggcatagagagccagaaaggtaggcgttaaaaggcctgatgctgaaatgacgtcggtgacgatccatactgcgggctactgccctatactccatggttgttaaacgggagttaaacatatcagagacgcctctgatttggcaaagatttaccttcctttgcaaacgaatgtgacaaggatattttacctttcgaaatttctgctaatcgaaagttaaattacggatcttcatcacataaaataattttttcgatatctaaaataaatcgcgaaacgcaggggtttttggttgtagcccttatctgaatcgattcgattgtggacgacgattcaaaaatacatctggcacgttgaggtgttaacgataataaaggaggtagcaagtgaccattgctattgttataggcacacatggttgggctgcagagcagttgcttaaaacggcagaaatgctgttaggcgagcaggaaaacgtcggctggatcgatttcgttccaggtgaaaatgccgaaacgctgattgaaaagtacaacgctcagttggcaaaactcgacaccactaaaggcgtgctgtttctcgttgatacatggggaggcagcccgttcaatgctgccagccgcattgtcgtcgacaaagagcattatgaagtcattgcaggcgttaacattccaatgctcgtggaaacgttaatggcccgtgatgatgacccaagctttgatgaactggtggcactggcagtagaaacaggccgtgaaggcgtgaaagctctgaaagccaaaccggttgaaaaagccgcgccagcacccgctgccgcagcaccaaaagcggctccaactccggcaaaaccaatggggccaaacgactacatggttattggccttgcgcgtatcgacgaccgtctgattcacggtcaggtcgccacccgctggaccaaagaaaccaatgtctcccgtattattgttgttagtgatgaagtggctgcggataccgttcgtaagacactgctcacccaggttgcacctccgggcgtaacagcacacgtagttgatgttgccaaaatgattcgcgtctacaacaacccgaaatatgctggcgaacgcgtaatgctgttatttaccaacccaacagatgtagagcgtctcgttgaaggcggcgtgaaaatcacctctgttaacgtcggtggtatggcattccgtcagggtaaaacccaggtgaataacgcggtttcggttgatgaaaaagatatcgaggcgttcaagaaactgaatgcgcgcggtattgagctggaagtccgtaaggtttccaccgatccgaaactgaaaatgatggatctgatcagcaaaatcgataagtaacgtattgtgttgattatcactcagttttcacacttaagtcttacgtaaacaggagaagtacaatggagattaccactcttcaaattgtgctggtatttatcgtagcctgtatcgcaggtatgggatcaatcctcgatgaatttcagtttcaccgtccgctaatcgcgtgtaccctggtgggtatcgttcttggggatatgaaaaccggtattattatcggtggtacgctggaaatgatcgcgctgggctggatgaacatcggtgctgcagttgcgcctgacgccgctctggcttctatcatttctaccattctggttatcgcaggtcatcagagcattggtgcaggtatcgcactggcaatccctctggccgctgcgggccaggtactgaccatcatcgttcgtactattaccgttgctttccagcacgctgcggataaggctgctgataacggcaacctgacagcgatttcctggatccacgtttcttctctgttcctgcaagcaatgcgtgtggctattccggccgtcatcgttgcgctgtctgttggtaccagcgaagtacagaacatgctgaatgcgattccggaagtggtgaccaatggtctgaatatcgccggtggcatgatcgtggtggttggttatgcgatggttatcaacatgatgcgtgctggctacctgatgccgttcttctacctcggcttcgtaaccgcagcattcaccaactttaacctggttgctctgggtgtgattggtactgttatggcagtgctctacatccaacttagcccgaaatacaaccgcgtagccggtgcgcctgctcaggcagctggtaacaacgatctcgataacgaactggactaacaggtgagcgaaatggttgatacaactcaaactaccaccgagaaaaaactcactcaaagtgatattcgtggcgtcttcctgcgttctaacctcttccagggttcatggaacttcgaacgtatgcaggcactgggtttctgcttctctatggtaccggcaattcgtcgcctctaccctgagaacaacgaagctcgtaaacaagctattcgccgtcacctggagttctttaacacccagccgttcgtggctgcgccgattctcggcgtaaccctggcgctggaagaacagcgtgctaatggcgcagagatcgacgacggtgctatcaacggtatcaaagtcggtttgatggggccgctggctggtgtaggcgacccgatcttctggggaaccgtacgtccggtatttgcagcactgggtgccggtatcgcgatgagcggcagcctgttaggtccgctgctgttcttcatcctgtttaacctggtgcgtctggcaacccgttactacggcgtagcgtatggttactccaaaggtatcgatatcgttaaagatatgggtggtggcttcctgcaaaaactgacggaaggggcgtctatcctcggcctgtttgtcatgggggcattggttaacaagtggacacatgtcaacatcccgctggttgtctctcgcattactgaccagacgggcaaagaacacgttactactgtccagactattctggaccagttaatgccaggcctggtaccactgctgctgacctttgcttgtatgtggctactgcgcaaaaaagttaacccgctgtggatcatcgttggcttcttcgtcatcggtatcgctggttacgcttgcggcctgctgggactgtaagactgttgtacactaccggggccttttggccccgtttttttatctggaggattaatgacaatcacggacctggtactgattcttttcatcgccgcactcctggccttcgcgatctacgatcagttcatcatgccccgccgtaacggccccaccctgctggcaattcctttgctccggcgtggtcgcatcgatagcgttatcttcgtcggattgattgtcattcttatctataacaacgtcacgaatcatggtgcgttaataacgacatggttattaagcgcactggctctgatgggtttttatatattctggatccgcgttccgaagatcatctttaaacaaaaaggttttttcttcgccaatgtctggattgaatatagccgaatcaaagcgatgaacttgtcggaagatggcgtgttggtgatgcaattagaacagcgtcggctgttaatccgcgttcgaaatatcgacgatctggaaaaaatttataagcttctcgtttcaactcaataagttatgaatttagccaaagctatgtttagtgtatttttaataatcagacatagcttagctatattacctcttcccttatttgttatttattttaacgtttcattgatatataaatctaaatgaaaatcgttatcaataaagcaatgaaataatatattccaacagttgttttatattctcaaaatatgttaaggttgcgccctcatttggggagtagccgatttccagattccggaaatgtacgtgtcaacatactcgttgcaaaacgtggcacgtacggactgaatactttcagtcaggcgagaccatatgcacatcaatcgctatgcctgcatgaacgcgaaaaccatcacggcttgttgttcatgtatgcatgtttgctgggggcgatgatgtgttttatggataccccggtcaggacattgtcatgaatatcactgctactgttcttcttgcgtttggtatgtcgatggatgcatttgctgcatcaatcggtaaaggtgccaccctccataaaccgaaattttctgaagcattgcgaaccggccttatttttggtgccgtcgaaaccctgacgccgctgatcggctggggaatgggcatgttagccagccggtttgtccttgaatggaaccactggattgcgtttgtgctgctgatattcctcggcgggcgaatgattattgagggttttcgtggcgcagatgatgaagatgaagagccgcgccgtcggcacggtttctggctactggtaaccaccgcgattgccaccagcctggatgccatggctgtgggtgttggtcttgctttcctgcaggtcaacattatcgcgaccgcattggccattggttgtgcaaccttgattatgtcgacattagggatgatggttggtcgctttatcggctcaattattgggaaaaaagcggaaattctcggcgggctggtgctgatcggcatcggcgtccagatcctctggacgcacttccacggttaataagaacgctgccagaggtgaatattaaagtccgtctggcagtcgaacacttcttttgctgccagtgtttgccagacttctggcttcgcacgccaggcaaacggcgtcatctgcaataatgcgacggcttcatcaccgcgaagacgcatcggataacacaactcatcactctgctgtaatgtaaaaccttccagttgttctgcatgaggtgcatgaagatgtacttcattgtaaatcagccccttcagctccatcaaatgtcgcggtcccggcgtggcagtaatgacccagccgccgggcttcactactcgtgctaattcttctgctttacacggcgcgtaaatacgtattatggcgtccatactggtatcggaaaacggcaaacggtggctggaagcgacacaaagagtgacctgcggatagcgtttcgccgccgcttttatcgctaccttcgagacatccaggccaaacgtggtgatttcgggcaacacatcggcaaatgcgtgtgtgtaatacccttcaccacagccaatatccagcaccgccgtggccttttcatcaagccgttcccgcagttgggcgacaattgcatcacgcagcggctgataatgtccggcatctaagaatgcgcggcgtgcttgtatcatttccgcgctgtcgcccggatcacgagaccgtttatgctgaacgggcagcagattgacatacccttctttcgccatatcaaactgatgtcgctggggacagatatagctgtttttttcacgcgaaagaggctgatggcaaagtggacaggaaaacgacatgacaactccggcaggatactaaaggccgcaagtgtaacgcgaatcacgcggcgggcaaatatccgaacgccaggagcgaagataaagcatagtaaaaagcctcgcattcgacgaggctttatagcgagattgaagcgtattcacacttcagatcagtggattcgatcagatagctgttacgttaacagctgccggacctttctggccgtcctgaatttcgaactcaacgttctgaccttcagccagagttttgaagccattaccctggatagcggagaagtgtacgaacacatctttgctgccatcagccggagtaatgaagccaaaacctttagactcgttgaaccacttaacctgacctttaatctttgccatttgaaaaattccttagattgttttcttcgcccgcaggcataacatagataaaactgacacattactgcatgaggcaccaatataaggctcggcagagaagcggtattcaacgtcaacgtgtttactcaggacttctttactgaaaatgccacacataaacagaactgtacctcgtttaacccgaaatctgttatcacatacaacgttaattatggcaagccatttttaaacatgtctcgatcagacgcacaaatctcgatacgtcttccactttttttgcacacttatgcaacggaatacgcgccgatatatcattgtgcttaaccttgccagttcaggcagatacttaaactggcgtattttctaacatagttcaataagttcagttgttccaggccagtgggagaagttattacatagtgcgtgcaatatcacattttttgctatgcaatgaataaaaagttatatcactttttctcataaaacagtcagttaacggctatcaattaccctaaagagaagtcaatccccaaagggattgaaaatttaaaataagaaaaattgatgaatgagcaaaaaaatcaagagagaaacgtttcgctaataaataataccacgcttaatcacaaatccgatgtaaacatcctaataaattaatgaggaaaatatctttttctgatatcccgttacgcaaataaataatatgataattatttgaagtcagaccagagttttaatttgaagcagttgcaccatggcagtgcgtataatcaggatgaattgagtaacccttcaacgacggggttactcaagattgaggaaggattatcgttcggcgaccagacgaataatatcttcgtcttcaaccgatttttgactctcaacggtctttttatctgctttctcaggttcgtttgcttcgcacaaacgacgtaacagtgcattttgacgtttttgctgatccagcaacgcctcaagcagttcaatctgttcgttagtccgagaactggcacgattgataaaaaaccacaagatgagcccgataagaagaaccaccaccgatacaaccaaagacgcaatgttcatcacgcctgaatttacaacttcgttcatttcaccacctctgagtagaggcgctattctaccactgctggagaggaagaaaatctagtgctgaaaaaatgatatcaccacgggataaactggttaatggcacaaattccgctgaaaaattgtacatcctgatcgcacatcatgttgaatacctgcgcccaaagcagcaagcaagccaacaccacgacaaccagaacgacccatcgaaactttttcactccaatctccgcttcacctaccttatgtcattaaactagcatgcgttagttaaacagcgcctaactatgtcgatattcgtgctttttcggaatgagtagcttgcttcagcgcatattgccgctacgattaagcgaacataaaaagagaagaggttgtaatgcgattcatcattcgcacagttatgctgatagcactggtatggataggattattactcagcggatatggcgttttgattggaagcaaagagaatgccgcaggattaggtttgcaatgtacctatctgactgccagaggcaccagcacggtacaatacttgcacactaaaagtggtttcttggggataacagattgcccactgttacgtaaaagcaatatcgtggtcgataatggttaagggtaataaataaccagattctcactcatgagtaaaatattcttatagcaagcgcgtttaatataacgcaccttcaactttatttttctcatgctaaataaagaacctgtctgtttgatattccgacaggttcttactctcatcagaacggatagtcgtgataacccatttgggcagaaattttgcgcgctgcggtatgcaacattgcgacatattcctgtaaacgctcttcagagaaacgggtgatgctgccaacttactgatttagtgtatgatggtgtttttgaggtgctccagtggcttctgtttctatcagctgtccctcctgttcagctactgacggggtggtgcgtaacggcaaaagcaccgccggacatcagcgctatctctgctctcactgccgtaaaacatggcaactgcagttcacttacaccgcttctcaacccggtacgcaccagaaaatcattgatatggccatgaatggcgttggatgccgggcaacagcccgcattatgggcgttggcctcaacacgattttccgccatttaaaaaactcaggccgcagtcggtaacctcgcgcatacagccgggcagtgacgtcatcgtctgcgcggaaatggacgaacagtggggatacgtcggggctaaatcgcgccagcgctggctgttttacgcgtatgacaggctccggaagacggttgttgcgcacgtattcggtgaacgcacgatggcgacgctggggcgtcttatgagcctgctgtcaccctttgacgtggtgatatggatgacggatgactggccgctgtatgaatcccgcctgaagggaaagctgcacgtaatcagcaagcgatatacgcagcgaattgagcggcataacctgaatctgaggcagcacctggcacggctgggacggaagtcgctgtcgttctcaaaatcggtggagctgcatgacaaagtcatcgggcattatctgaacataaaacactatcatattcctgtaaacgctcttcagagaaacgcaacgtcgggaaggagatgctcaaaccggcaatgaccacgccaaagcgatcaaataccggtaccgcaatgcatcgcagcccttcttcctgctcttcgttatcttcgccatacccctgctcgcgcacctggtccagaacgggtaataacgcttctgtactggtgatggtccgctcggtactgcgtttatactccacgccctcaagaatttgcttcacttcatcgagatcgcgccatgccagcagtaccttaccaatcgcggtgctgtacagcggattacgacgcccaatccgtgaatacatgcgcaaattgtacatagagtcaattttgtgaatgtaaacaatactgtcttcgtccagtgcgccgaggtggatagtttctttggtcaggcgggagatctcacgcatctggatatctgcgctacgaattaaatcgacgttttgtaacgcgcgagcgcccagttcaaacaatttcagggtcagggaatatttctccgactccccttcctgcgccacataacctaaggttttcatggtctgtaaaaagcgataaacggtgctttttgacatcatgacgcgctgcgacagctcggttatccctatttcgcgctcttcacccagcgcctgcaaaatgccaaaaacttttagcacggaagatacagaatcaggctgtttatccagatctgcgttagccatttatcacctcattgcgagtgttttataaaaatcagaactgttttttattataatttcgcaccagggtggtcgcaatccatcttttgccggttagttacaattctgcgacatccaccgtgaatatcagtgctagaatcatacccctgttgattattcaccaaagatataaaattcctatgccaaaagttcaggccgacggcctgccattgccccagcgatacggtgcgatattaaccattgtgattggtatttcgatggctgtccttgacggcgcaatcgccaacgtcgccctgccaacaatcgccacggaccttcatgccacgccagccagttccatctgggtagtgaacgcctatcaaatcgccattgtcatctccctgctctcgttttcgtttctgggcgatatgtttggctatcgacgtatttataaatgcggtctggtcgtttttctgttgtcttcactgttctgcgccctttctgattcgctgcaaatgctcacccttgcgcgtgtcatacaaggtttcggcggtgcagcgttgatgagcgttaataccgcacttatccgcctgatctatccacaacgttttctggggagagggatgggcataaactcgtttattgttgccgtctcttctgctgccgggccgacaattgctgcagcaatcctctccatcgcatcctggaaatggttatttttaatcaacgtaccgttaggtattatcgccctgcttctggcgatgcgttttctgccacccaatggttctcgcgccagtaaaccccgtttcgacctgcccagcgccgtgatgaacgcgttaaccttcggcctgcttatcactgcgttgagtggtttcgctcaggggcaatcgctgacgttaattgctgcggaactggtggtaatggttgttgttggtattttctttattcgccgccagctttctcttcccgtaccgctgctaccggtggatttactgcgtatcccgctgttttcactttctatttgcacatctgtttgctctttctgcgcacaaatgctggcaatggtttccctgcccttttacctgcaaaccgtgctcgggcgtagtgaagtcgaaacaggtttacttctgacaccgtggccgttagcaacgatggtgatggctccgttggcaggctatttgattgaacgcgtacatgcaggattgctgggtgctctagggttgttcatcatggctgcggggcttttttccctggttctgctgcccgcgtcacctgcggatatcaatattatctggccgatgatcttatgtggcgctggatttggcttgttccagtcacccaataaccacaccattattacctccgctcctcgcgaacgtagcggtggagccagtggcatgttaggaacggctcgtctactgggtcagagtagcggcgcggcactggtggcgctgatgctaaatcagttcggtgataatggtacgcacgtttcgctgatggctgcggctattctggcagtgattgctgcctgtgtcagtggtttacgtatcactcagccacgatccagggcataaaaaaagcgcgtcgatcaggacgcgctttttagtatttacttcatattacttcaggtattcacccgtacgcagagcttcaattcgtttatccagcggcgggtgagtcatgaacaactcactgagcgatttcgacttaccgttaatgcagaaagccatcatgctggttgcttcttgcggttcatagctggttttcaggcgctgcagcgcggcaatcattttctcgcgaccaaccagttttgccgaaccggcatcagcatggaattcacgatgacgcgagaaccacatggtgataatgctcgccagaataccaaacaccagttccagaaccgttgcaaccgcaaagtagatcagcgggttgccgttgctctcttcaccttcatcacgatttccgcccataaaacccgcggcaagctgcgccagaatacgggaaataaagataacgaaggtgttcaccacgccctgaatcagcgtcatggtgaccatatcaccattggcgatgtggctgatttcgtgagcaattaccgcctcggcttcatccgggctcatgttctgcagcaaaccggtgctgacagcaaccagagaggcatcacggcgcgcaccggttgcaaaagcgttgatgtccggcgcatggtagatagccacttgcggcatagcgatccctgcctgacgagcctgggttgctacagtattaaccagccaacgttccctttcgttacgcggttgctcgatcacttccccgccaacagatcgtaatgccatccatttggacatcagaagcgaaacgaaggaaccaccaaaaccgaacagcaaggccatgatcatcagcccctgaacgctgctcgactgtatccctgtcaggctcagtaccagcccgaaaacgaccattacggccaggttcgttagcaggaagagcgcgattcgcatcataattttctttttacctcagtttaacaaaacgcaatatgcgatacccacatcgtatgggttacgcgactattttcaagtctggatagtgcgtaagtcaccagaaagacacaactttacattttgtagcatctgatttacggcatcttgccgctgttaaaaaatcaggcacaatttcttgtgcctgattgatattacttgacgggagcgggttgttccgcgggtctggctttttcaagcttcgccagatcgagtgcgatattcaccgtctcatccagataaggatccggctcctggtaatctttcggtagatcatccagcttcttcaactccggtttaccttcgcgtttaaagcgttcgttcaaacgcgccagacgcgtcgcatcatcttcattattctctttctcacgcacagcgtagttcagagaaacgatattgcgcttgtccttcatagcgttgaagcgcgcgatatccttcatgatgttctggaactcaggatctttcgcgatacgcgcattatgttccttcagcagctccggcccaaaggccgttaaatcgcctgatttcacataagtcgcggcatcaatgctatcccacggcagcgcgttatcttcgaatttctcacccgtttccgtttcttcattacccgtcggcatgatgatgtctggcgttacgcctttacgttgcgtactgccgccgttaacgcgatagaatttctggatcgtgtactgcacagaacccagcgctggccattcaggacgtaacatctgatcgtaaatacggttcaatgaacggtattgctgaacggtgcctttaccaaacgtcggttcacccacaaccagcgcacgaccgtaatcctgcattgccgcggcaaagatttctgaagccgaagcactgaaacggtcaaccagtaccaccagcgggcctttatagaacacctgcccgtcggtatcgctgtcttcacgaaccttgccgttgttatcgcggacctgaacaatgggacccgcaggaataaacagacctgagagcgataccgcttcggtcaacgccccaccgccattgctacgcaggtcgatgatcacactgctgacattctgtttttccagtttctgcagttgaactttgacatcgtctgtcaaacccacatagaagcccggaatatccagcacgccgactttctctttaccgacggtcttcaccgacattttaaccgcgcggtcttcgagacgaatacgttcacgggtcaatgttacagtgcgggtcttggtccctttaccagcaggtaaaatttccagacgaactttactgcccttcggccctttaattaaggcaaccacatcatcaagacgccagccaatcacgtcaaccatcggcttgcctgtttgaccaacaccgacaattttgtcaccaacgctgatagctttactcttcgctgccggaccacctgccaccatcgaattgataacggtgtagtcatcatccatttgcagcactgcgccaataccttccagcgacaaactcatttcagtgttgaactgttcggtattacgcggggaaagatagttggtatgcgggtcgatttcacgcgcaaacgccgtcattgccagcgagaaaacatcttcgctgttggtttgcgccagacgacgaatggcaaatttgtagcggcgtgtcagggtttcacgaatttctttatccgtttttcctgccagcttcaggcttaactcgtcgaatttgactttactgtcccacagcgcgttcaactcagcctcgtttttcggccagggcgctttgctgcggtcaaggttataagtgtcgttgccggtgaaatccatcggcttttccagtaccgacaaagcgtactggtaacgctcaaaacggcgcttttgcgccagattgtagagatcgtagaaaacgtcgagtttgcctgaacgcagttcatcgcctaactcggttttctttttcgcgaactgttcaacatcgcttgccagcagcacgttgtggctgtaatcgagcagattcaggtagcggtcaaagattttggccgaaaatgcctgatcgaggtcgaactggcgataatgagaacgggtgaagcgcgacgttacgcgctcacttaccgtcgcatgctgcgtctcttcctttaataccggaatttgatcagcacgcgtgatatcttctacagcgaaggtctggcctgctattgcaagcaggccagctaacgcggtaagcctaaaaaacatgttcatgcctggcccggcctccgtttcagaacaccaggtgttctgcgcgcacaatcaaagacatacccgaattcagctggacgcggacgccgtctttggtgatttctaatacggtggcatccatcgcgttttgacccgctttcaccttcagggcttgtccgacagtcagagctgaaatgtcagaaaccggggtgtgctgttcttcgcgaggtgcttttactgtttttggcgctttctctaccggcttttgcgcacgaggtttacgttcagcgccttctttgcggcgtggcgtggtcggacgtggcttgcgttcgcggcgcggtgcgtcttctttctcaccagcagctgcggcagcttcgcgttttttcgcttgctgttcagcacgctgtgcctgaacacgcgctttcgcttcttcaagctgcttgcgagcatgctctacatgttgctcgtccagctcaccgcatgggttgccgtcaagatcgacacgcgttgcgccgggtttaacaccgtaaagataacgccagctcgaagtgtagagacgtaaagcggatcgtaattgcgttttgctcaggttcatttccccggcaacacgatcgaccaaatcctgaaaaataccgattttcagcggacgcgcttcaccttccgcactgaaacagtggggaaaacgttcggccagaaacgcgattacttctttactgctattcaacttaggttgattttccatgaaatttcctgattacaacggacgtagccaacaagcgcaggcatgaacaggcgtcattataatgacgctaccagtaaatgctacgttatccgttgattatcctgcgacgctcgcaaagaattttttgtaatccgtcgttgcaagcactttttcaagctgtgccacaagctgacgtaagccttgctcgtcctcgtctgtaaagcgaccgaagacggtactatcgatgtcaagaacaccaataatctgatttttcaccaccagcggcagaacaatttcagaattactcgccgcatcacaggcaatatgcccgtcaaacgcgtgaacatcctcgatacgctgcacttgattgcgggcaaccgcagtgccgcacaccccgcgcccgacgggtatccggacacaggcaattttgccctgaaatggtcctagtaccaatgtatcgtcctcaagcaaataaaaacctgcccagtttacgtcagtgagacgctcgtataacaacgcactggtgttcgcaagcgttgccagaaaactggtttctcccgccatcagcgcgttaaagtcgcgatttaaatccgcgtaaaattctgttttgttcattatataatcacttggttgtcttacctggaactgccagcctattaaaataagcattaaatgcgttaatgctcaagatcattccaatcatgggttaatattaatgttaattcttattacatttggcacgtcatggctcttaacacaccacaaattacgccgacaaaaaagataacagtgagggcaatcggtgaggaactgccgcgtggtgattaccaacgttgcccgcaatgtgacatgctgtttagcctgcccgagataaattctcatcagagtgcctattgtccgcgctgtcaggcaaaaattcgcgacgggcgcgactggtcgctaacgcgcctggcggcaatggctttcaccatgctgttgctgatgccgtttgcctggggcgaaccgctgttgcatatctggctgttaggtattcgtatcgacgccaacgtcatgcaaggcatctggcaaatgaccaaacagggcgatacgataacgggggcgatggtctttttctgcgttattggtgcccccctcattctggtgtcctccatagcatatttatggtttggtaaccgactgggaatgaatttacgtccggtactgctgatgcttgagcgacttaaagagtgggtaatgctggatatctacctggtcggcattggcgttgcttctataaaggtacaggattatgcccatatccaggcgggtgtcggcttgttctcttttgtggcgttggtgattttaacgacggtgacgttgtcacatcttaatgtcgaggagctgtgggagcgattttatccgcagcgccccgctacgcgtagggacgagaaacttcgtgtctgtcttgggtgccattttaccggctatcctgatcagcgtggtcgctgcccgcgttgccatatcccgctacgcctgcgtcgccgtcatagtttgcaaaaatgctgggcggcgctgttagcgtcaatcgttttgttgttacctgccaacctgttgcctatttctatcatttatctgaacggaggacggcaggaagatacaattctttccggaattatgtcgctggcaagtagcaacattgcggttgcgggaatcgtgtttatcgccagtattctggtaccgtttactaaagtgatcgtcatgttcactttactgttgagcattcattttaaatgccagcaaggtttacgcacacgcattctgttactgcggatggtgacctggattggtcgctggtcgatgctcgacctgtttgtcatatctttaaccatgtcgctgattaatcgcgatcagatcctcgcttttactatgggaccggctgcgttttatttcggcgcagcggtaattttgactattcttgctgtggaatggctggacagccgcttactttgggatgcacatgagtcaggaaacgcccgcttcgacgactgaagcgcagattaaaaataaacgccgtatctcacctttctggctgctgcctttcatcgcgctaatgattgccggttggctgatttgggacagttatcaggaccggggtaataccgtcaccatcgactttatgtcggcggatggtattgtcccgggccgtacgcctgttcgttatcagggcgttgaagtcggaacagtgcaggatatcagcctcagcgacgatcttcgtaagattgaagtcaaggtcagcatcaagtccgatatgaaagatgcgctgcgcgaagagactcagttctggctggtgacgccaaaagcatcgttggcaggtgtctccgggctggacgccctcgtcggtggtaactatatcggcatgatgccaggtaaaggtaaagagcaggatcactttgtcgcactcgatacccaaccgaaatatcgactggacaatggcgatctgatgatccacctgcaagcccccgatctcggttcgctgaacagcggttcattggtctatttccgcaagatcccggtgggaaaagtctacgactatgccatcaatcccaacaaacaaggcgtggtgattgatgtcctgatcgagcggcgttttaccgatctggtgaaaaaaggtagccgtttctggaacgtttccggcgttgatgccaatgtcagtatcagtggcgcgaaggtgaaactggaaagcctggcggcactggttaacggtgcgattgccttcgattcaccagaagagtcgaaacctgccgaggcggaagatacctttggtctgtatgaagacctcgcccatagccagcgtggcgtaataataaaactggaactgccgagtggggccggattgaccgccgactcgacgccattaatgtatcagggactggaagtcggacagctaactaaactggatttaaatcctggtggtaaagtcactggggaaatgacagttgatcccagcgtcgttaccctgcttcgtgaaaatacccgcatcgaattacgtaatccgaaattatcccttagcgatgccaatctcagcgccctgctgactggcaaaaccttcgagttggtacccggcgatggcgagccacgcaaagagttcgttgttgtgccaggcgaaaaagcactgctgcatgaacctgatgttctgacgctgaccctgaccgcgccggaaagttacggtattgatgctggtcagccgctcattcttcacggcgtgcaggtaggccaggttatcgatcgtaaactcaccagcaaaggcgtcacctttaccgtcgccatcgagcctcagcatcgagaactggtaaaaggcgatagcaaatttgtcgtcaacagccgtgtcgacgtgaaggtggggctggatggcgttgagtttctcggtgccagcgcctcagaatggattaacggcgggatacgtattctgccgggcgataaaggcgagatgaaagccagctatccactgtatgccaatctggaaaaagcgctggagaacagccttagcgatttacccaccacaaccgtgagtttgagtgcagagacgctgccggatgtgcaggcaggatcggtagtgctctaccgtaaatttgaagttggtgaagttattaccgtgcgtccgcgagctaacgcgtttgatatcgatctgcatattaagccggagtatcgcaaccttctgaccagcaatagcgtgttctgggcagaaggcggggcgaaagttcagctgaatggtagtggcctgaccgtacaggcatccccgctctccagagcattaaaaggggctattagcttcgataacctcagtggtgccagcgccagtcagcgtaaaggcgacaaacgtattctgtatgcttccgaaacagcggcccgtgcggttggtgggcagattacgcttcacgctttcgatgccggaaaactggcggtcgggatgccaattcgctatctcggtattgatatcgggcaaatccagacgctggatctgattaccgcgcgcaatgaagtacaggcaaaggcggtgctctatccggaatatgtccagacctttgctcgcggtggtacgcgcttctcagtggtcacaccgcaaatttcggcagctggcgttgagcatctagatactatcctccagccgtatatcaacgtcgaaccaggccggggcaatcctcgccgcgactttgaattacaagaggccaccattactgattcgcgttacctggatggcttaagcattattgttgaagcgccggaagccggttcgttaggtattggtacgcctgtgctgttccgtggtctggaagtcggtacggttacaggaatgacgctggggacattgtcagatcgcgtgatgattgcgatgcgcatcagtaaacgctatcaacacctggtgcgtaacaattccgtcttctggttggcatcgggttacagtctggactttggtctgacgggcggcgtagtgaaaaccggcacctttaaccagtttatccgtggcggcatcgccttcgccacgcctccgggtacgccactggcaccgaaagcccaggaaggcaaacacttcctgttgcaggaaagtgaaccgaaagagtggcgtgaatggggaactgcgcttcccaaataatgcccactgctccggcgtgcctgcgccggagcgtttatgctaaactgcgcgcctgtttttttgccagtggtacatgctcgtggcccaacacaccgtttatttcccggacgcctttctgacacaaatgcgcgaagcgatgccttcgacgctctcatttgatgattttcttgccgcctgtcagcgcccgttgcgccgcagcattcgcgttaatacgctgaaaatctccgttgctgatttcctgcaattaaccgctccttatggctggacgcttacgccaattccgtggtgtgaagaaggtttctggattgaacgcgacaatgaagatgcattgccattgggtagtaccgccgagcatttaagcggcctgttttatatccaggaagccagttcaatgttgcccgttgccgccttgtttgctgacgataatgcaccacagcgggtgatggatgtcgcagctgcgccaggctccaaaacgacgcaaattgccgcgcggatgaataacgaaggggcaatccttgccaatgagttttccgccagtcgggtaaaagtgttacatgccaatatcagccgctgtggcatcagtaatgttgcgctcacacattttgatggccgcgtgtttggtgcggcagtgccagaaatgttcgatgccattttgctggacgctccctgctctggcgaaggcgtggtgcgtaaagatcccgatgcgctaaaaactggtcaccagaaagcaatcaggaaatcgcagctacacaacgggagcttatcgacagcgcctttcatgcattacgtcctggtggtacgctggtttactcgacctgtaccttaaaccaggaagaaaacgaagccgtttgcctgtggctgaaagagacttaccccgacgcagtagagtttttaccacttggcgatctcttccctggtgcaaacaaagcgctgaccgaagaaggctttttgcatgttttcccacaaatttacgactgcgaaggcttcttcgttgctcgtctgcgtaaaactcaggcgatccccgccttacccgcccccaaatacaaagtcggtaatttcccgttcagcccggtgaaagatcgcgaagccggacaaattcgtcaggcggctgcaagtgttggcttaaactgggatggaaacctgcgactctggcaacgcgacaaagaactgtggttgttcccggtgggcattgaagccctgatcggtaaagtccgattttctcgcttggggattaaacttgccgaaacgcacaacaaaggttatcgctggcagcatgaagcagttattgcccttgccacccccgacaatgtgaacgcttttgaactgacaccgcaggaagcggaggagtggtatcgcgggcgcgatgtttacccgcaagccgcgccagtggcggatgacgtgttggttactttccagcatcaaccgattggtttagccaaacggattggttcgcgattgaaaaacagctatccgcgtgaactggtgcgcgatgggaaactttttaccggtaacgcctgacagcgcacaaaaaaagcgcactttttgactggcacattcggctgcctcaactaggctgaaaaatggtgcgatcggactggtcgtaccacaaccggcagctaaatggagagcacgaagatgaaaaccagtgtgcgcataggcgcttttgaaatcgacgacggcgaattacacggtgaatcgccgggtgatcgaacgttaaccattccttgtaaatctgaccccgatttatgtatgcaactcgatgcctgggatgctgaaaccagtatccctgccctgctaaatggcgaacactctgtcctttaccgtacccgttacgatcaacaatctgatgcctggattatgcgtcttgcctgatccaaaaagaacccgtcggcatggcgggttatttgtcctggttattcccccgttgtaaaatctctcctaaacttaacggtacggcaccacacttcggggatgaaatgttcgcgctggtactttttgtttgctacctggatggcggttgtgaagatattgttgtggatgtctacaacacggaacagcagtgtctttattctatgagcgatcaacggatccgccatggcggttgttttccgattgaggattttatagatggtttctggcgaccagcacaggagtatggtgatttttaattattgcaattgcacaagagtcagttcgcccccaaagacagcaccggtatcaatataatgcaggttgccaatatccacgcgatgtcgcaacggtgtatgaccaaaccagaaatgatcagcacctgtaattccctgccctttttggcgttcacctaatcgcgagcggctccacaagacctgatgcaaatcaacgtccttttgccattcataaacatcatctggataatcggcatgagcaataacatgtttgccggtacgactgtgtacttcaagaataaagggcaaatgctgacatttttccagcgccgttttcgcttgtttctgttgattatctgccagcgcaataaaccagtcgccgccattcatcaaccacaaagacatctgctgggatgccagcgcatccatcgccatctgttcatgattgcctcttaccgcacgaacccaatgttgttccagtaactgcaggcaacgtaaactttgcggcccacgatcgataacgtctcccactgagataagtaaatctcgccacggatcaaaaccacaatgccataatttgcggcgcaactgctcaagacaaccgtgtatatcgccagaaagccagatatgtcgccattgatgacccgcaattctctgataaacgggcgcaggctgtttcatcaatattttcctcccgcgctaaagatcacataatcttaacaagaatgttaaaaaacgctggactcagacagtagagtgtgtgttatggttgactataaagtcagcgaaggaaatgcttctggcttttaacagataaaaagagaccgaacacgattcctgtattcggtccagggaaatggctcttgggagagagccgtgcgctaaaagttggcattaatgcaggcttagttgccttgccctttaagaatagatgacgacgccaggttttccagtttgcgtgcaaaatggtcaataaaaagcgtggtggtcatcagctgaaatgttaaaaaccgcccgttctggtgaaagaactgaggcggtttttttattggaaatcaaaaggctattttaggtaattaacagagtttttcagctcgttctataaacggtgccagactcattttttcgccgggattgttaggatcatcaatctgaatcaccgaaatgggttgggctttagtcttcccactggcaacttccttttgtgcgatatcgtttaaaggatactgcacgagggtacttgggttgatgacatacaaagcattacccggtcggcaagtcagcatcacctcttcgcgattaaacgcccatttgtctttacccacttcaaaacggctgacggtaatcacctgcggtgcagccagcgccgctgcagaactggtgagtaacagaaacgccagaatactttttttcatcattttcgtaatccatcaaaaaggttcgagagtcgcaagcaggctgatgatcaccagcactaccgcacctatcgcccattcgagtttagtcatccactcaaaccagggtgccgcacgatcttcatcctgcctcatgcgcggtacaagaacataacgattagccagcgcaatgaccaccataatcatcaccaggatggctttgagcaataagagttggccccagtaagtcgtaagcgtggggggaaatccggtaatcaacaatgcattaagcacgccgcttgccagtacgccgatcaccgcaaaatgcccgcaccaggaaaaacgcatcagcgcctgaatggcctggtgtcgccaacggcctttgatgagttgcatacaccagagcaccggcagtaatcccccaaaccacgccgccgcacaaatcaggtgaatcgcgtgattagtctgatggattttcgccgttaccccttcattcagcgtcgcatgcccgattcccgccagcagaataaattgcgcggtagtgagcataaacagcaaacgtggcatattccgcggttgcataagggcgacgatcaacgttacgagggcgagaacaatttgccataaccagacgccaccaaactgcgtttgcaaaacagcctgccaaatgtttggcgaaaatacatctgcccatcccgttcccatcaacccgccctgaacggcgagcattgcagtggcactgatcaaactccagacggcagcgtgctgttgtaaacgcagaaaacgcttcgccagcaagcgacgaatcgttaagggggccagccaggcaccgtacattgcgaagccaaagaccagcatcagcgaggtgaaatggataaatcgcagcgcgatccaggtaaacgccagcatgatttatttcacgctaaaggtgtagtgtcctttcgttttatgcccgtccaccgaaacaacatgccagtcaacgatgtaggttccgggtttcagcgaatcggccagtggaacaatcagttgcttttggtcctgctcatttcgcttcgccggtaatgttttaatattttcgttttttggccccgtgatttttgcaccactgaatcctgtttcaacaccttccgagaagtttaaagtgattgcctgcggtgcagctgtcacttgcgcgtttgccgcaggatactgatgcgttaaatgcgcatgtgcccagacggaaggtgtcaccaacgaagtggtcaggattgccagcgcgtagcgaagggagcgtgcagttgaagtcatattatctattcctttttgtaataacttttttacagagcataaccttgtctaatgtctgagtcgaggatcatcaattccggcttgccatcctggctcactcttagtaacttttgcccgcgaatgatgaggagattaagaatgctgaagaatctggctaaactggatcaaacagaaatggataaagtgaatgtcgatttggcggcggccggggtggcatttaaagaacgctacaatatgccggtgatcgctgaagcggttgaacgtgaacagcctgaacatttgcgcagctggtttcgcgagcggcttattgcccaccgtttggcttcggtcaatctgtcacgtttaccttacgagcccaaacttaaataaaacttatacagagttacactttcttacataacgcctgctaaattatgagtattttctaaaccgcacccataatttgcagtcattttgaaaaggaagtcattatgtcgttctggaaagttgcagcagcgcaatatgagcctcgtaaaacctcactcaccgaacaggtagctcatcatctggagtttgtgagggccgccgccaggcaacaatgtcagctgttagtttttccatcgctttctttactggggtgtgattattcgcgacgtgcccttcctgccccacccgatctctcactgttagacccgctttgttatgccgcaacgacctggcgaatgaccatcattgccggccttcccgttgaatataacgatcgctttattcgtggaattgcggtgttcgcaccgtggcgaaaaacgcctgggatctaccatcagagtcatggtgcatgtctgggccgtcgttccagaaccatcacggtggtcgatgaacaaccgcaaggtatggatatggacccgacctgttcactgtttactacagggcaatgtctgggagaacccgacctgctggcgtcggcccgtcgcttacaatttttttcacatcagtactcgattgccgtgctgatggcaaatgcccgtggtaacagtgcactatgggatgaatatggtcgtctcatcgttcgcgccgatcgtggttcattattgttagtcggtcagcgttcatcacagggttggcaaggcgatatcattccattacgctaggctttttcggcctggagcatgccatgttgcgcattatcgatacagaaacctgcggtttgcagggagggatcgttgagattgcctctgttgatgtcattgacggaaaaatcgtcaaccccatgagccacctggtgcgccccgatcgtcctattagtccacaagcgatggcgattcatcgcatcaccgaagccatggtcgccgataaaccgtggattgaagatgtgatcccacactattacggtagtgaatggtatgtcgcgcataacgccagctttgaccgccgcgtactgcctgagatgcccggtgagtggatttgcactatgaaactggcccgtcgtttgtggcctgggatcaagtacagcaatatggcgttatataaaacacgcaagctcaatgtacagacgccgccgggcctgcatcatcaccgcgcgttgtatgactgttatatcaccgccgcgttgcttatcgatattatgaacacctccggctggacggcagaacagatggccgatatcaccggacgtccgtcgttgatgacgaccttcacctttggcaaataccgtggcaaagcggtttccgacgttgccgaacgcgatccgggctatctgcgctggttatttaataacctggacagcatgagcccggagctgcgtttaacactgaaacattatctggaaaatacttagtccgcaggcgtagcgggtaatgttccctgcgccagcgcgaccagaaaagcatattccatcgctacgccttcgtacgatttaaagcgaccagatttaccgccatggcctgagtccatgtcggtacagagcaataaaagatggtcatcggttttcagctcgcgcaatttagcgacccattttgccggttcccaatattgcacctgagaatcgtgcaaaccggtcgttaccagtaaatgcggataagcctgtgcggtgacgttgtcatacgggctgtagcttttcatgtactcgtaatattgcggatcctgcgggttaccccactcttcaaactcaccagtggtaagaggaattgattcatcaagcatcgttgttacaacatcaacaaacggtacctgggcgataacgccgtggaataattccgggcgttgattaattgcaacgcccatcaacatgccccccgcactcccgcccatcgcataacaaagcgaaggagagccatagcccagttttaacaatgcatcgcaggcatcaagataatcattaaacgtatttttcttcttcagaaattttccgtcttcgtaccattgttgccccagctcaccaccgccgcgaacatggacaatggcgtagacaaagccacgatctaacaaactcaagcggctaaaactgaaatcggcatcaatacttgcgccgtaagaaccatagccatacaccagcaacgggttgtgtcctttgcgaaaatgtttgcgatggtagaccaacgaaaccggaacttcgacgccatcacgggcgactatccacaggtgttcactgcggtaattcgccgcatcaaaaccgggcacttctgtttgttttaatacacgacgctcaccggtatccatatccagttcaaacaaagtgtctggtgtggtcatggaagaataaccataacgcaatcgcgcggtttcaggttctggattgtaggcaatccaggtcacataggctggatcatcaaaggcaataccaatgacttcccgggtcttgcggttaatttggcgcaaactggttaacccgcgctgacgctcttcaaccaccagccagtcggtaaacagcgtaaacccttccagcatgatgttttcgcgtggcggaattaactcttcccactgttgctcatcacgcatacgggtacggtataagccaaagtttttgccgtggcggttggaacgcagataaaaacgatgctggtagtgatcaaggctgtattcgtgatctttgcggcgcggcagaaaaacaaacggctcggcatcggccatttccgcgtccagcaggcgaacttcactggtggtggcgctggccaaatgaatgactacatagtgcttcgaggtcgttttatgcaggctgacgtaataggtatcgtctttttcttcgtagatcagtttatcttgcgatgctggcgtaccgatggcgtgacgccagacctgataaggcagcagcgtcaccggatgcttgcgaacatagtagaaagtccaggagtcatttgcccagacaaagctgggttcaacgttatccagcagttccgggtaccagttaccagtttccagattacgaaaacgaatgccgtactggcgtcgggaaagaaaatcttctgccagcgccataatggtgttatcgggcgtaatcgccattccgcccatcgaataaaactcactatgagctgcgcgcttattggcatcgagcaatgtttcccactcatcccactcttcactgaatgccgattgacgctggtagatagcatattcacagcctggttcataaatatgccgatagcggtagccatttttgatgtagggcgcagaaacttctcgttgcggaatgcggtcgatgatttcctttaagatgcgatcctgcaaggcttgttgtgaggccatcacccgatgaccgtaactattttcttgttgcaggtagtccaggacttctggctgagaacgcgtatcgtcccgcagccagtagtaattatcgatgcgcgtatcgccatgaagcgtcatggcgtggggaatgcgggcggcttttggtagcatgttattgttctttctggttgaaacatcttataagggtggcaaaactcaccggggatgcaagcgaaacaggggagtcattgcttagatgatgacaggtaatggcgcggatatcgaatgttatgcagacagagaaaatcagcctgttcaaatggctgtgcgattctggatagcccgaaatagtcaacttcaggctatccagagagcggaattattccgccaaagtgcgtttttgctgttcgagatcgcgttcaatgccgtcacgaacatcctgggggattttcagcgcgtcacccagtgcattcaggtaactgcgttccataaaatggtcaatatcaatagccgcgcaactcaggaaatagatttccagcgcctcttcttcattgcggaccccggtagccaggcgttgtggatccagcggttgttcgattgcctgctcaatgagtacacgcccctgctcttccacgccggcttcacgcaattgctggtcgattgccgcacgttctttggcatcaatatgaccatcacttttagcggcaaagaccagcgcaaggatcaaacgttctgtacgctcatccagcggcgtactttgcgcgccaaactgcggttcgtcctgatgcgccgcgcgaattttatctttgtatttattccacagcaccgtacccgctaccgctccgccgccaaccagtaacgcgttggtgccatatttcgtaagaagtttacgtgctgatttatttgcgaccagcagcccagccagtccgcctaatgcgcctggcactaacagtttgcccaatccctgatccgcagacgaggaggtagaagaactgctttgcccaagcagggattgcagttgatttaaccagttagccatatttgctcctcaataaccatttttagtgcctgtagcatagcggatgaggatgtcagaaaatgtatatcgagacaaaagatgcgcaaataagcggggcggtaggccgttattcaaagaaattcgcgccaggtaaggtatttactgtatatcaggtgataagggtattttaggtgaaagtagtttgtcgttttgagtggcattgtttgatgctgattgcccgatgcgacgctgttgcgtcttctcaggcctacgattgtggtgcgttctggggcggacaaggcactcgcgccgcatccgccaacggtcaatcgaattatcagaagccattaacgccgctgatattccgccattcccgctttgcagtccacgctgacctggtaatgaatatcggcacttttaccacgcacggttagcggtactgaccatttatcatctttaccctgaatgtcctgcaaactgacccaagccacgggatcggcctgaccgacaattttttgatcatctgcccagcgcgccacgcgattttgttgataatcacgttttacgctcgcggcaattccggcagcatccagaccttcacactttgggaaagtgaccgacttgctggtttcattattggcagcgaaaactgatgcgcaggcagaaaccaacaacagccctaaaaacgcccctctttttttcatgtttttctccatagcacaatgattcaggagaaagcatggtacaaattgtcaggagcgcaagttgcttcaggccgcgtgtgaggcatcttcctcttcggattcagcaccgacgacctgtggggacggtaatttgccggttttcagaatggtgctcagcacatctttttgttctgccagccatagcgaaagggcttcacgttgctcgtcttccatttgcactggagaatttgtcagccaggtgtcaagcagatccgccgtatcaagcattttatcataagcatcggcttcctttttgctggtaaacgacattttctcttcgccctcacgaatgactacgtatttaacttcaaccgccatttgcagcctctcataataactgtgattttatacagtatatttcttttcggttgagaaatcaacatcagcaataaagacacacgcaaacgttttcgtttatactgcgcgcggaattaatcaggggatattcgttatgacgttattaggcactgcgctgcgtccggcagcaactcgcgtgatgttattaggctccggtgaactgggtaaagaagtggcaatcgagtgtcagcgtctcggcgtagaggtgattgccgtcgatcgctatgccgacgcaccagccatgcatgtcgcgcatcgctcccatgtcattaatatgcttgatggtgatgcattacgccgtgtggttgaactggaaaaaccacattatatcgtgccggagatcgaagctattgccaccgatatgctgatccaacttgaagaggaaggactgaatgttgtcccctgcgctcgcgcaacgaaattaacgatgaatcgcgagggtatccgtcgcctggcggcagaagagctgcagctgcccacttccacttatcgttttgccgatagcgaaagccttttccgcgaggcggttgccgccattggctatccctgcattgtaaaaccggtgatgagctcttccggcaaggggcagacgtttattcgttctgcagagcaacttgctcaggcatgggaatacgctcagcaaggcggtcgcgccggagcgggccgcgtaattgttgaaggcgtcgttaagtttgacttcgaaattaccctgctaaccgtcagcgcggtggatggcgtccatttctgtgcaccagtaggtcatcgccaggaagatggcgactaccgtgaatcctggcaaccacagcaaatgagcccgcttgcccttgaacgtgcgcaggagattgcccgtaaagtggtgctggcactgggcggttatggtctgtttggtgtcgagctgtttgtctgtggtgatgaggtgattttcagtgaggtctcccctcgtccacatgataccgggatggtgacgttaatttctcaagatctctcagagtttgccctgcatgtacgtgccttcctcggacttcctgttggcgggatccgtcagtatggtcctgcagcttctgccgttattctgccacaactgaccagtcagaatgtcacgtttgataatgtgcagaatgccgtaggcgcagatttgcagattcgtttatttggtaagccggaaattgatggcagccgtcgtctgggtgttgcgctggcgaccgctgagagtgttgttgacgccattgaacgcgcgaagcacggccgccggacaggtaaaagtacagggttaaacccggcaaaaaaacgctacaaaaatgcccgatcgtagatcgggcgttttgacttttacagcttagcgccttctacagcttcacgcgccagcttagtaatgcggtcgtaatcgcccgcttccagcgcatctgccggaaccagccaggaaccaccgatgcacagcacgcttttcagcgccaggtagtcacggtagttagccggagaaataccacccgtcgggcagaaacggacctgggagaacggacccgcgatcgcctgcagggctttcacgccgccgttagcttcagccgggaagaatttgaactctttcaaaccgtagtccatacccagcatcagttcggaaacagtgctgatccccggaattagaggaatagtcccttcggtagcagctttcagcagcggctcggtcagacccgggctaattgcgaactgtgcacccgcttcagtgacttctgccagctgctgtggattcagcaccgtaccggcacccacaatcgcttcaggcacttctttggcgatagcacggatagcgtcaactgcacactcggtacgcagagtcacttccagaacgcgcaccccaccagcaaccaacgcttttgccatcggcactgcgtgttccagtttttttaccacgataaccggtacaaccgggccggtggtcaggattgattctgcacttgttttccagtttttcatcagagttttctctcgcctgattacaaatttgtcgtcttaaaaagtgatacaggttgcgccctgttcggcaccggacagtttttcacgcaaggcgctgaataattcacgtcctgtccccacgcgtgacgcgctcaggtcaggaatgtgcggttcgcgagcagccagttccgcttcgtctaccagcagcgtcagttcgcctgtctgtccattcacacgaatgatgtccccgtcgcgcacttttgccagcagcccgccatcgtaggcttctggtgttacgtggatagctgacggcactttacctgaagcgccggagagtcgtccatcggtaactaacgcaattttgaaacaccggtccaataatacaccaagtggcggcatgagtttatgtaattctggcattccgttcgcttttggcccctgatgacggacaacaacgacacaatcgcggtccagcaaacccgcttcaaaggccggcataacgtcatgctggctttcaaaaacaaccgctggcgcttcaatcacctggttctcaaccggcacggcagaggttttcataaccgcacggcccaggttaccgcttaacacttttgtcccaccatgatgagagaaaggttgttcgaaggaagcgatcacattgctgtcgagtgatttttccgccccttcccgccagtccagttcaccattattcagccatggttcaagggtataacgagacagaccaaagcctgccaccgtattgacatcttcatgcagcaggcctgctttgagcagttcacgcaccagaaccggtacgccacctgccgcctggaagtggttaatatcggccggaccgttcgggtagagacgtgccatcagcggtacaacatcagaaaggtcggagaagtcatcccagttaatctgaataccggccgcgcgcgccatcgccaccaggtgcatggtgtggttagtggaaccaccggtcgccagcagagcaacaataccgttcaccaccactttctcatcgatcatcttaccgatcggcatccattcattgccattaccggtcatgcgtgtaacctgacgcgcagcggcagcggtcaaagcatcgcgcagcggagaatccggatgaacaaaagaagagcctggcaactgcatccccataaattccaccaccatctggttggtgttggcagtaccgtagaaagtacatgttcccggcgcgtgataagacgcggcttctgactccagtaaggccatgcggtccactttaccttcggcataaagctggcgaatacgcactttttctttatttggcaaaccgcttgccatcggtccagacggcacaaacaccgcaggcaaatgaccaaacgacagggctgccatcgtcagacccgggacaatcttgtcgcacacaccgaggaacagagcaccatcaaacatgttatgggacagcccgaccgccgcagacatcgctatcacttcgcggcttagcagcgacaattccattccatcctgcccctgggtgacaccatcacacatcgccggaacaccgcccgcaacctgaccaaccgcattcgcttcatgcagggctttacgaatgatttctggatagtgttcataaggctggtgcgcggagagcatgtcgttataggaggtgatgatggcgatattgttacgcaacatgcttttcaaagaggctttgtcttctggctggcaggcagcgaaaccgtgtgccaggttaccgcatgccaactgcgaacgatgaacggtcgaagttttcgcttgttctatccgggcgagataagcagagcgagtctcgcgcgaacgttcaatgattcgatttgttacgcgtaacaattgtggattcataaaggctcctgaaattgagttgtcagagcaggatgattcacaacgcgtttcattcagaggatttatgactgaaacgcctgtaaccggagctcatagggcaaaaacgtttcagtcagtgtaataaaaaaagcctcgtgggtgaatccgcacgaggcctgaaagtgtaaaaattgttctacaatctgtgcaagatcatgttaccggtaaaataaccataaaggataagcgcagatattactcaaactcattccaggaacgaccatcacgggtaatcatcgccaccgaggcaacgggtccccaggttccggcctgatacggtttcggcgcatcattgtccatcgcccacgcctcagtaatggagtctacccatttccaggcttcttccacttcatcacgacgtacaaacagtgcctgaataccacgcatggtttccagcagcagacgttcataggcatccgccagatgcgtctgattaaaggtttctgaatagctcagatccagcttggtgatttgcaggttatgtttgtggtcaaggccaggaactttattcagtacctggatatccacgccttcatcaggttgcagacggatagtcagtttattctgcggcagatcctgccacgactctttaaacagattcagttcaggtgttttgaaatagaccacgacttcagaacatttggtcggcagacgtttaccagtacgcaggtagaatggcacaccggcccagcgccagttatcaatgtcgacgcggatcgccacgaaggtttctgtattgctgctcttgttcgcgccctcttcttccagatatcccggcacttttttgccctgggcgaagcccgcagtatattgcccgcgtacggttttttcgcgtacgttggagcggtcgatgcggcgcagggacttcagtactttcactttttcatcgcggatgctgtctgcgctcaggtcagatggcggagacatcgcaatcatgcagagaatttgtagcaggtggttctgaatcatgtcacgcatctgaccggctttatcaaaatagccccagcgcccttcgatccccacttcttctgccacggtaatctcaacatgatcaatggtgcgattgtcccagttattcacaaacagggagttagcaaaacgcagcgccaacaggttcagcaccgtttctttaccaagatagtggtcgatacggtaaacctggcactcctcgaagtattcgccaacctgatcattgatttcctgcgaggtcgccagcgacgtccccagcggtttctccatgactacgcgtgccggtttagcattcagttttgcctcgccaagccctttgcaaattgcgccaaaagtgctgggcggcatggcaaagtagttaatggtgatacgatttttttgatccagcatcgcgccgagacggttgaatgcagcagtgtcattgacatcgagattacaaaaatccagacgtgcactcagggtgtcccataaaccttcatcaatggtttctttcatgaaagtttcgagcgcctcgcggacaactttggtatatgccgctttatcccagtcagcacgccctacgccgataatccgggtgtccgggttgagctgaccggctttttccagttgatacagggaaggcagcaatttacgacgcgcaaggtcgcctttcgcgccgaaaatgaccaggtcacaggcctgggctgtttgcgttaccgccatgtcattctccttaagttaactaacccggtacttaagccagggtatacttgtaattttcttacggtgcactgtactgcttttacgagcttgcgaaaactgtaaacgcttatccacccgtgcgattacgggaaaagcgcgcaaagtgcggcaaaactgataaaaaaatcatcgttttccattcggtaaaaatctgacactgatcatgttatgaaaaaaaataacaacttttttatctgcttttgtcattaacacggcacacaggcgtaatatctgacaaaactgcatttcgatttctttcagtgcggaaatcgtcattacccgtgagtctctttacatcatgaatatgctggaaaaatccagtctcagctggaacatttgagcaaatcagagcgcaaagttgccgaggtcattctggcttcgcccgataacgcgatccattcgagtattgctgctatggcactggaagccaatgttagcgaaccgacggtgaatcgtttctgtcgcagcatggacacgcgcggttttcctgattttaaacttcatctggcacagagtctggcgaatggcactccctatgttaatcgcaatgtcaatgaagatgacagcgttgaatcatacacagggaaaatatttgagtccgcaatggcaacgcttgatcatgtccgtcattcactggataaatctgccatcaaccgcgccgtcgacttgctcactcaggcaaaaaaatcgcctttttcggattaggctcttcagccgccgttgcccacgatgcgatgaataagttctttcgttttaatgttccggtggtgtactccgatgatatcgtgctgcaacgcatgagttgtatgaattgtagcgacggagacgtggtggtgctgatttctcacactggaagaacaaaaaatctggtcgagctggcgcagctggctcgcgaaaacgacgcaatggtgattgccctcacctctgcgggtaccccgctcgcccgggaagcaacgctggcaattaccctcgacgtaccggaagatactgacatttatatgcccatggtttctcgacttgcacagctgaccgtgatagatgtgctggcgacaggatttactttgcgacgcggtgcaaaattcagagataacttgaagcgggtcaaggaagcgctgaaggaatcgcgttttgataagcagttacttaatttaagtgacgatcgctaaaaacgactgtcactgtcctaatcttatacgacatccgaatgagattaatttatcgccatcgcggcgttatttcattcggatttcatgttcaagcaacacctggttgtttcagtcaacggagtattacatgtccagaaggcttcgcagaacaaaaatcgttaccacgttaggcccagcaacagatcgcgataataatcttgaaaaagttatcgcggcgggtgccaacgttgtacgtatgaacttttctcacggctcgcctgaagatcacaaaatgcgcgcggataaagttcgtgagattgccgcaagactggggcgtcatgtggctattctgggtgacctccaggggcccaaaatccgtgtatccacctttaaagaaggcaaagttttcctcaatattggggataaattcctgctcgacgccaacctgggtaaaggtgaaggcgacaaagaaaaagtcggtatcgactacaaaggcctgcctgctgacgttgtgcctggcgacatcctgctgctggacgatggtcgcgttcagttaaaagtactggaagttcagggcatgaaagtgttcaccgaagtgaccgtcggtggtcccctctccaacaataaaggtatcaacaaacttggcggcggtttgtcggctgaagcgctgaccgaaaaagacaaagcagacattaagactgcggcgttgattggcgtagattacctggctgtctccttcccacgctgtggcgaagatctgaactatgcccgtcggctggcacgcgatgcaggatgtgatgcgaaaattgttgccaaggttgaacgtgcggaagccgtttgcagccaggatgcaatggatgacatcatcctcgcctctgacgtggtaatggttgcacgtggcgacctcggtgtggaaattggcgacccggaactggtcggcattcagaaagcgttaatccgtcgtgcgcgtcagctaaaccgagcggtaatcacggcgacccagatgatggagtcaatgattactaacccgatgccgacgcgtgcagaagtcatggacgtagcaaacgccgttctggatggtactgacgctgtgatgctgtctgcagaaactgccgctgggcagtatccgtcagaaactgttgcagccatggcgcgcgtttgcctgggtgcggaaaaaatcccgagcatcaacgtttctaaacaccgtctggacgttcagttcgacaatgtggaagaagctattgccatgtcagcaatgtacgcagctaaccacctgaaaggcgttacggcgatcattaccatgaccgaatcgggtcgtaccgcgctgatgacctcccgtatcagctctggtctaccaattttcgccatgtcgcgccatgaacgtacgctgaacctgactgctctctatcgtggcgttacgccggtgcactttgatagcgctaatgacggcgtagcagctgccagcgaagcggttaatctgctgcgcgataaaggttacttgatgtctggtgacctggtgattgtcacccagggcgacgtgatgagtaccgtgggttctactaataccacgcgtattttaacggtagagtaagtacgttgccggatgcggcgaaaacgccacatccggcctacagttcaatgatagttcaacagatttcgaatattctgaagcaaacttgaacttatcatcaggcgaaggcctctcctcgcgagaggcttttttatttgatgggataaagatctttgcgcttatacggctggatttcgcccggtttgcgagttttcagcaattttagtatccaggtgtattgttctggtcgcggaccaacaaaaatctcgacttcttcattcatccgccgcgcaatcgtatgatcatccgcctctaacagatcatccatcggtgggcgcacctgaatcgtcagacgatgcgtcttgccatcataaatcggaaacagcggtacaacgcgcgcacggcacactttcatcaaacgaccaatcgcgggcaacgtcgctttataggtggcaaagaaatccacaaattcgctgtgctctgggccatgatcctgatcgggtaaataatatccccagtacccctgacgtaccgactggatgaatggtttaataccgtcatttctcgcatgcagacgaccgccaaagcgacgacgcaccgtgttccagacataatcaaaaaccgggttgccctgattatggaacatcgctgccattttctgcccttgcgaggccatcagcatggcaggaatatcgacggcccaaccgtgcggcaccagaaagataactttctcgttattacgcctcatctcttcgatgatctccagcccttgccagtcaacgcgcggctgaattttctccggtccgcgtattgccaactcagccatcattgccatcgcttgcggcgcggtggcaaacatctcatcaacaatcgcttcgcgttcagcttcactacgttctggaaagcagagcgacagattgattaacgcacgacggcgtgagctttttcccagtcgtccggcaaaacgtcccagccgtgccagaatgggatcacggaactttggcggcgttaaagcgatacccgccatcgctgctacgcccagccatgctccccagtagcgcgggtggcgaaaggatttatcaaactcaggaatgtattcgctattattttttttcgtttccatgcttttccagtttcggataaggcaaaaatcaatctggtgatagtgtagcggcgcaacttgccccgcaccaaataaaaaaagccggtactgactgcgtaccggctgcgaatggatgttaattaatcaaaccgtagctgcggcacaatctctttggcctgcgccaggaattcgcgacgatcggagccggtcagcccttcggtacgcggcagttttgccgtcagcgggtttacggcctgctggtttatccatacttcatagtgcagatgtggcccggttgaacgtccggtattaccggaaagcgcgatacggtcgccacgtttcaccttctgtcccggtttcaccagaatcttgcgcaagtgcatataacgcgtggtgtagctgcgaccatgacgaatagccacataataacctgctgcgccactgcgtttggcaaccaccacttcaccgtcacccactgaaagcactggcgtaccctgcggcatggcgaaatcaacacctctgtgtggtgcaacgcgaccggtcacaggattagtacgacgcgggttaaagttagacgagatacggaactgtttcgccgtcgggaatcgcaagaatcctttcgccagaccagtaccgttacgatcgtagaatttgccatcttcagcgcggatagcgtaataatctttaccttctgaacgcaaacgtacgcccagcagctggctttgctcacgtttaccatcaagcatttctcgagacattaataccgcaaattcatcgccttttttcagtttgcggaaatccatttgccactgcatggctttaatcactgcgctcacttcggcgctggttaaaccggcgtttctggcgctggcaacaaagctccccccgacggtacctttcagcagattgttaacccactctccttgctgcatttcgctggtcattttaaaaccgttagcggcagtacggtcataggttcgggtttcacgacgagacacttcccaggtgaggcgctgcagttcgccgtccgcggttaatgtccaggagagttgttgaccgattttcaggttacgcaattctttgtcggcagcagccagttgggtgatatcacccatatcaataccatactgattgagaatgctgcttagcgtatcgccagtggaaacaacatattcatgcacgcccgcttcaccggcgattttgtcatccagttcgtcctggggaatggcttcatcttcttgtgcagcttgatcaatcggctcactggcttcaggtaagagcgaacgaatttcgttctgttccagctcaatggttttgacaattggcgtggcatcgcggtgataaacatagggccgccagacagcgacggccagagtaagaacggtgagcgaccccaacataacgcggtgtggtcgcggtaaattattaaacgccagggcgacagagcgggctatctgttgcacgtaatcacttcctcattaatctcctttcaggcagctcgcatactggttggctaattgactcaggaattctgaatagcttgttttacccagtttgatattcgtccccaggggatccaacgttcccatacgaacggatgtccctcgtgcgacgctctcaacgaccgctggcctgaactgtggctcagcaaaaacgcaggttgctttttgctcaaccaactgtgttcttatttcatgtaaacgctgcgcgccaggttgaatctcagggttaacggtaaaatgaccaagcggtgtcagtccaaactgtttttcgaaatagccgtaagcatcgtgaaaaacgaaataacctttccccttgagcggcgcgagctcgttaccaacctgcgtttcggttgaggctaattgtgcctcaaaatccttcaggttggcgtcaagtttggctcgactttgcggcataagttccactaattttccatggattgcaaccgctgtagcccgcgctatctctggggaaagccaaagatgcatgttgaaatcgccgtgatggtgatcttcgtcacttttttccgcgtggtcgtgatcatcatcatcgccgtgaatacttttcatcagtagcggtttcacatcttcaagctgcgcaatcgttacctgcttcgcttctggtaatttgcttaccggtttttgcataaacgcttccatctccgggccaacccaaacgactaagtccgcgttctgtaagcgttttacatccgatggacgcagtgaataatcatgttctgaagcgccgtcaggcagtaaaacctccgtttctgttacaccatcagcaatggcagaagcgatgaacccaacgggtttaagcgaagcgacaacggcggcatctgcggcctgtgttgcacctccccagagagcggcggataatgctgcgaaaagaagcgtttttttatgtaacataatgcgaccaatcatcgtaatgaatatgagaagtgtgatattataacatttcatgactactgcaagactaaaattaacatgacaagtctggtttccctggaaaatgtctcggtttcttttggccaacgccgcgtcctctctgatgtgtcgctggaacttaaacctggaaaaattttgactttacttgggccaaatggcgcaggtaagtcgacactggtacgggtagtgctcgggctggtaacacccgatgaaggggttatcaagcgcaacggaaaactgcgcatcggctatgtaccgcagaagctgtatctcgacaccacgttgccactgaccgtaaaccgttttttacgcttacgccctggtacacataaagaagatattttgcctgcactgaaacgtgtccaggccgggcacctgattaacgcaccgatgcaaaagctctctggtggcgaaacgcagcgtgtactattagcgcgagcattgttaaatcgcccgcaattattagtgctggatgaacccactcaaggcgtggatgtaaatggccaggtggcgttatatgaccttattgaccaactgcgtcgcgaactggattgtggcgttttaatggtctctcacgatctgcatctggtaatggcaaaaaccgatgaagtgctgtgtctgaatcaccacatttgttgttccggcacaccggaagttgtttccctacatccggagtttatttctatgtttggtcctcgtggtgctgaacaactgggtatctatcgccatcatcataatcatcgtcacgatttacagggacgaattgttttgcgtcggggaaatgatcgctcatgattgaattattatttcccggttggttagccgggatcatgctcgcctgtgccgcgggtccgctgggttcgtttgtagtctggcgtcgtatgtcttatttcggtgatacgctggctcatgcctcattacttggcgtcgcgtttggtttgttgctggacgtgaatccattctatgcggtaattgccgttacgctgctcctggcgggcggtctggtatggctggagaagcgtccacagctggcgattgacacgttattagggattatggcgcacagtgccctgtcgctgggcctggtggtcgttagtctgatgtctaacattcgtgttgatttgatggcttacctgttcggtgatttgctggcagtgacgccagaagatctcatcgctattgcgattggcgtggtcatcgtggtggctattttgttctggcaatggcgcaatttgctgtcgatgacgattagcccggatctggcgtttgttgatggtgtgaaattacagcgcgtgaaattgttgttgatgctggtgacggcattgacgattggtgtagcgatgaaatttgttggcgcgttgattattacttcactgctgattattcctgcagctactgcgcgtcgctttgcccgtacgccggaacagatggctggtgtcgctgttttggtggggatggtggcagtaactggcggtttaaccttttccgcgttttacgatacgccggcgggtccgtcggtggtgctatgtgcggcactgttatttattctcagtatgatgaaaaagcaggccagctaatctatcgctgaacacatttgtcggatgcggcgcgagcgccttatccgacctacggttcgctatctctggctggcctgataagacgcgaacagtgtcgcatcagacacactgccagtgtcggatgcggcgcgagcgaccaatccgacttacggcatttctggcggcgttatgccaaagtgattccacgcccgcgtcgtcgccatacgcccacgcggtgtacgctgcaaaaagccttgctgaatcaaataaggttccagcacatcctcaatggtttcacgttcttcgccaatggctgccgcaaggttatccagacctaccggcccaccaaagaacttatcgattaccgccagcaataacttgcggtccatataatcgaaaccttcagcatcgacattcaacatatccaacgcctgagcagcgatatctgccgagatggtgccatcgtgcttcacttcggcgaaatcacgcactcgacgcagcagacggttggcaatgcgcggcgtaccgcgagctcgacgagcaacttccagcgcgccgtcatcactcatctcaagccccataaagcgtgcgctgcgactgacgatatattgcagatccggcacctgataaaactccagacgctgcacaataccaaaacgatcgcgcaacggtgatgtcagcgaacctgcgcgcgtggttgcaccaatcagggtaaacggcggcaaatcaattttaatggagcgtgccgccggaccttcaccaatcatgatatccagttggtagtcttccattgccggatacaacacctcttccaccactggcgaaagacggtggatctcatcaataaacaacacgtcatgcggttcaaggttagtgagcatcgctgccagatcgcccgccttttccagcaccggaccagaagtcgtgcgtaaattaacgcccatttcattggcgacgatgttggcaagcgtagttttacccaaccccggaggaccgaaaatcaacagatgatcgagggcatcgccgcgcagtttcgctgctttgatgaaaatctccatctgtgaacgaacctgcggctgaccaacatactcttccagtaatttagggcgaatggcgcgatctgccacatcttccggcaaagtggtaccggcagaaatcagacggtctgcttcaatcatcctttacctcataacgcggcgcgtagggcttcgcgaattaatgtttcactgctggcgtcagggcgagcgattttgctcaccatgcggcttgcctcttgtggtttatagcccagcgccaccagcgcggcaactgcttcttgttcagcatcgtcggtcgccgggctggcaggtgatgtgagtaccaggtcggcggctggcgtaaagagatcgccatgcaaacctttaaatcggtctttcatttcaacaatcaagcgttcggcggtttttttgccaatacccggcagtttcaccagcgcccccacttcttcacgctcaacggcattaacgaactgctgcgctgacattccggagaggatcgccagcgccaacttcgggccgacgccgttggttttgatcaactctttgaacaatgtgcgctcttgtttattgttaaaaccgtacagcagttgcgcgtcttcacgcaccacaaagtgggtgaaaacgatcgcttcctgacccgcttcagggagttcataaaaacaggtcatcggcatatgcacttcatagcctacgccgcccacttcaattaacaccagcgggggttgtttttcaatgatgatgcctctgagtctgcctatcacatgacgctcctgcgtaatgaatcaaagataatgctgtatgataaaaaatgctggatagatatccagcgaaggatgaagaaaacttgcgaggtgtcccgatgatctgaaaaatggcagagtataatttattcaacaggttatattggaagcaaatatttgaatattacatattcagtgaagaaatgcgtaataaaaatatacattgcgactcctgaaaaaataaattttttatgctattacgtatattcgtatcgatttcaatggaatgacaacgtgaatattaattaccctgctgaatatgaaattggagatatcgtctttacatgtataggtgctgccttatttggtcaaatatcagctgcatcaaattgctggagtaatcacgtcgggatcattatcggtcataacggtgaagacttcctggttgcagaaagccgggttcccctttcaaccatcaccacgctatctcgttttattaaacgttcgtctaatcaacgctatgctataaagcgattagacgctgggctgacagaacaacaaaaacaacgaattgttgaacaggttccttcccggctacgcaaactttaccacacgggttttaaatacgaatcttcccgccagttctgttcaaaatttgtctttgatatttataaagaggcgctatgtattccggtgggtgaaatagagacgtttggacaactgttaaatagcaatccgaatgcaaaactcactttctggaaattctggttcttaggttctattccgtgggagcgtaaaaccgtcacgccagccagtttgtggcatcatccgggtttggtgttgattcacgcggagggagttgaaacgcctcagcctgaactgaccgaggcggtataacttaacgcagtcgccctctcgccaggttcagccgcgattcgctcatctgcatcgcattctgactgacgtgacaatgggtaatcgcgatagctaacgcatcggcggcatccgcctgtggattagcgggcagtttcagcaaggtgcggaccatatgctgcacctggcttttttcggcactaccaatacctaccaccgtttgctttacctgacgtgccgcgtattcaaataccggcaattcctgattcaccgccgcaacaatcgccacgccgcgcgcctggcccagtttcagggctgagtcagcgttcttcgccataaagacttgttcaatggcgaaataatcaggctggaactgggtgatgatttccgtcacgcccgcatagatgagcttcagacgagacggtaaatcatccactttggtgcgtatgcatccgctacccaggtaggacagttgcctgcctacctggcgaattacgccatagccggtcacgcgcgaacccggatcaatgccgagaataatagccatcacgcgtctccgttttgctgtttagcaggcctcatcagagagtcgctgcgacctcatcagagatttcaccgttatggtaaacttcctgcacgtcgtcgcaatcttccagcatatcgatcagacgcatcagtttcggtgcggtttctgcatccatatcagctttggtggacgggatcatggaaacttccgcgctgtctgctttcagacctgccgcttccagagcgtcgcgcactttacccatttcttcccatgcagtgtagacatcaatcgcgccgtcatcataggtcacaacgtcttcagcacctgcttccagagctgcttccatgatggtgtcttcatcgcctttctcgaaggagatcacgccttttttgctgaacagataggctacggaaccatctgtaccgaggttaccgccacatttgctgaatgcatgacgcacttcagcaacggtacggttgcggttgtcagacagacattcaatcatgattgccgtgccgccaggaccgtaaccttcgtagatgatggtttccatgtttgcatcatcatcaccgcccacaccacgtgcaattgcgcggttcagtgtgtcgcgggtcatgttgttagacagtgctttatcaattgctgcacgcagacgcgggttagcgtccggatcgccaccgcccagcttagccgcggttaccagctcacgaatgattttagtgaagattttaccgcgctttgcatcctgcgcagctttacgatgtctggtgttggcccatttactatgacctgccataaaaatatctccagatagccctgcctgttcaggcagcgttaattacaaactgttcaatcgcctgccggttgctccaggacttagtgagcgccgccgcagcaggcgcatcaagccacttgtaagccagatgttcagtgaaaacgatctgccgctcgtgtgggagcgcaagacagaaccatgattccgtattacgcgtcacgcccggcgcatagcgatgacgtaaatgtgaaaaaatttcaaactctaccgtgcgctgacagtcaattaaggtcagttgttcagcgacaacatcaatggtgacctcttcctttacttcgcgcacggcagcttgcggcgcggtttccccctcttccacgctgccggttaccgactgccagaaatcgggatcgtcacgccgctgcaacatcagcacccgtttcgtatcttgtgcgtagatgaccactaagatcgaaacgggacgcttataagccatatcagttattctcagccttcttcacaacctgaatgctcagctcagccagtgcagtcgggttagcaaagctcggtgcttcagtcatcagacacgctgccgccgtggttttcgggaaggcaataacgtcacggatattgtcggtgccggtcagcagcatggtcagacggtcaagaccgaatgccagacctgcgtgcggcggagtaccgtatttcagagcgtcgagcaggaagccgaatttctcgcgctgttcctcttcgttgatacccagaataccaaacaccgtctgctgcatatcaccattatggatacgtactgaaccaccgcccacttcgtaaccattgatgaccatatcgtaagcgttcgccaccgcattttccggtgcagctttcagttctgcagcagtcatgtctttcggtgaggtgaacggatggtgcattgccgtcaggccgccttcaccgtcgtcttcaaacatcgggaagtcgataacccacagcggtgcccatttgctttcgtcggtcagaccaaggtctttacccactttcaggcgcagtgcgcccatcgcgtcggcaacaattttcttgttgtcggcaccgaagaaaatcatatcgccatcttgcgcggcagtacgatccaggatggcttcgatgatttctgcattaaggaacttcgctaccgggctgttgataccttccagacctttcgcgcgttcgttaactttgatgtaagccagacctttcgcgccgtagattttaacgaagttaccgtattcgtcgatctgcttacgggtcagcgatgcgccgcccggaacgcgcagagcggcaacgcgacctttcggatcgttcgccggacctgcaaatactgcaaactcaacagatttcagcagatcagcaacgtcggtcagttccatcgggttacgcagatccggtttatcagaaccataacggcgttctgcttccgcaaaggtcattaccgggaaatcgcccagatccacgcccttcacttccagccacaaatgacgcaccagcgcttccatcacttcacgcacttgcggcgcggtcatgaaagaagtttccacatcgatctgagtaaattcaggctgacgatcagcgcgcaggtcttcgtcacggaagcatttaacgatctgatagtaacggtcaaaaccggacatcatcagcagctgtttgaacaactgtggggattgcggcagtgcgtagaatttacctttgtgcacacgagaaggcaccaggtagtcacgcgcgccttccggcgtggctttggtcagcatcggagtttcgatgtcgaggaagccgtggtcatccataaaacggcgcaccaggctggtgattttagcgcgggttttcaggcgctgcgccatttccgggcgacgcaggtcgaggtagcggtatttcagacgcgcttcttcggtgttgacgtggttagagtcaagcggcagaacatctgcgcggttgatgatagtcagcgaggacgccagcacttcaatttcgccggtcgccatatcgcggttaatatttttttcgtcacgcgcacgtacggtgcccgtaacctgaatgcagaactcattacgcagttcagaggccagctttaacgcgtccgcacgatccggatcgaaaaatacctgcacgataccttcgcggtcgcgcatatcgatgaagatcaggctaccaagatcacgacgacggttgacccaaccacacagagtcacctgctgccccacgtgggacaaacggagctgtccacaatattctgtacgcatgagatatcccttaacttagctgccggcggatgccccctgctgcgcaggtgaccaagtcgcagcgttagctgtatgtcacaactgaatgaaaaaaggcggctattatactggaaattctgccgcaccgtaagagcctggcccgcgctggaacgcctcgttaccactttatatcgggcctgaaatcagactctacgccagtttgctataaaggtgttgcccgaactcataaaaattaacaaaatttgtcgttccgccatcggctaatcgcattaaggtgtgaggcacgattttgttttttcaggagtcagcatgcttgaacttaatgctaaaaccactgcgttggtggtgatcgatttacaagaaggcatcttaccttttgccggtggtccacatactgccgatgaggtagttaatcgcgccgggaagctggcggcgaaatttcgcgccagcggtcagcccgtgtttctggtgcgcgttggctggtctgccgatcacgccgaagcattaaaacagccggttgatgccccctcccccgctaaagtgttgcccgaaaactggtggcaacatccagctgcattaggtgcaactgacagtgatatcgaaatcatcaaacgtcagtggggtgcgttttacggtacggatctggagttgcaactgcgccgccgaggtatcgatacaatagtgttatgtgggatctcgaccaatatcggtgttgaatccaccgcccgcaatgcctgggaacttggctttaatctggtgattgccgaagacgcctgtagtgccgccagcgccgagcagcacaataacagcatcaaccatatctacccacgcatcgcccgtgtgcgtagcgtggaagagatccttcacgcgttatgatttacatcggtctaccgcaatggtcgcatcctaaatgggtgcggttgggaatcaccagccttgaagagtatgcccgccactttaactgcgtgatacggcaacaccacgctttacgccctgccgaaacccgaggttgtcctgcgctggcgtgaacagaccacagatgacttccgcttctgttttaagtttccggcgaccatttcgcatcaggcagcattacgacattgcgatgatttagtgactgaatttttgacccgcatgtcaccgttggctccgcgcattgggcaatactggctgcaactgcctgccacattcggcccacgggagctgcctgcgctttggcattttctcgattctctccctggcgaatttaattatggtgtggaagtccgccatccacagtttttcgccaaaggggaagaggaacaaacgcttaatcgcggtttacatcagcgcggcgttaatcgggtgattttagacagccgcccggttcatgcagcacgtccacacagtgaagctattcgcgacgctcaacgaaaaaaacctaaagttccggtacatgctgtactgacggcgacaaatccgctgatccgttttatcggtagtgatgatatgacgcaaaaccgggaattatttcaggtctggttacaaaaattagcgcagtggcatcagaccactacgccttatcttttttacatacgccagacattgcccaggccccggaactggtacataccctgtgggaagacttacgtaaaacgcttccagagatcggagcagttccggctattccacagcaatcttctcttttctgaatttgccacctatcatagacaggtgccatcggccattttaaagggagtttgtatggtaagcgcgctgtatgccgttttaagtgcgttgttattaatgaagttctcttttgatgtcgttcgcttgcgtttgcagtaccgcgttgcctatggtgacggtggttttagcgaactgcaaagcgctattcgcattcatggtaacgcggtggaatatattcccatcgcgattgtgctgatgctgtttatggaaatgaatggcgcagaaacctggatggtgcatatttgcggcatcgttttgcttgctggtcgtctgatgcattattacggttttcatcaccgtctgttccgctggcgacgttccggcatgagcgccacctggtgtgcgctgttgctgatggtgctggcgaatctttggtatatgccctgggagttggttttctccctgcgttagcgcacaatacgccactttctttttcccggatttttacgttatgtctcaccgcgacacgctattttctgcccctatcgccagactgggcgactggacctttgatgaacgggtagctgaagtcttcccggatatgatccagcgttccgttcccggctattccaatattatttccatgattggtatgttagccgagcgcttcgttcaacctggtacgcaggtttacgatctgggttgttctctgggcgcggcgacgctctcggtgcgtcgcaacattcatcatgataattgcaaaattattgccatcgacaactccccggcgatgattgaacgctgccgtcgtcatattgacgcctataaagcccctacgccagtagacgtcattgaaggtgatattcgcgatatcgccattgaaaacgcatcgatggtggtgctgaattttaccctgcaattcctggaaccttccgagcgccaggcattactggataaaatttatcaaggactgaacccgggcggcgcgctggtgctttcggaaaaattcagtttcgaagatgccaaagttggtgaactgttgttcaacatgcaccacgactttaaacgtgccaacggttacagcgaactggagatcagccagaagcgcagcatgctggaaaacgtgatgctgaccgattccgtggaaacccataaagcacgcctgcataaagccggttttgagcatagcgagctgtggttccagtgctttaactttggttcactggtggcattaaaagcagaggacgctgcatgatcgactttggtaacttttattctctgattgccaaaaatcatctttcacactggctcgaaacgctgcccgcgcagattgctaactggcagcgcgagcagcagcacgggctgtttaagcagtggtccaacgcggtggaatttctgcctgaaattaaaccgtatcgtctggatttattgcatagcgtaaccgccgaaagcgaagagccactgagcaccgggcaaattaaacgcattgaaacgcttatgcggaacctgatgccatggcgcaaagggccgttctcactgtatggcgtcaacatcgataccgaatggcgttccgactggaaatgggatcgtgttctgccccatctttctgatttaaccggacgcaccattctggatgtcggctgcggcagcggttatcacatgtggcgcatgattggcgcaggcgcgcacctcgcggtggggatcgaccctacgcaactgtttctgtgccagtttgaagcggtgcgtaaactactgggtaacgatcagcgcgcacatttgttaccgttaggtattgaacagcttccggcactgaaagcctttgataccgtcttttcgatgggcgtgctttaccatcgccgttcgccgctggagcatctctggcagttgaaagatcaactggtgaatgagggtgaactggtgctggaaacgctggttattgatggcgatgagaacacggtgctggtaccaggcgatcgttacgcgcaaatgcgtaatgtctatttcatcccttccgcgctggcgctgaaaaactggctgaagaagtgtggttttgtagatatccgcattgtggatgtgtgcgttaccactactgaagagcagcgacgcactgaatggatggttaccgaatctctgtccgatttcctcgacccacatgatccgagtaagacagttgaaggttatcctgcgcctaaacgcgcggtgctgattgcgcgcaagccgtaaaggtctggtattactgccggatgcggcttgaatgccttatccggcctacaaacccttgctaattcaatctattgcagggactatacaaggcctgataagcatagcgcatcaggcagttttacgtttgcataacctcagcgcccgtttccgggcgctattcacttcttatgcctgaatagctggctgatcaaacgccgttaacttcggcgcattgcccgtatatttttcgatatacaccagcgcagagttaccggcacaggcatttgccagctgcgagctggggatatccgccgttaacacgttcgcactgccgtttttacacaagccattttccagatctggccatgcaccttcatgcacgcataccacgccttttttgatcccgtcagtcaccaccgcgcctgtcagaatctgaccacgtttgttccacacacgcaccagatcaccattcgcaataccaaagcgagcagcatcttcggtgtgaatagtgattggttcacgatctgcaaccgcatattttttacgcagttccgcatagttaagctgactatgtaaacggtgtgccggatgtgcggtcagaagctgcaactgcttctcgtcggcggtacccttccactcatcaggcgcaagccaggttgggtgtgccgggcaatccttatagccaaatttttccagcgttttggagtaaatctcaattttgccgcttggcgtacccagcgcatttttcaccggatcggcgcggaaatcagcataacgaacgtactgttcgttcttctcgctgcggcgcatttcgatcagtttattttgctgccagaaggcattaaacatcggcatagtcacgcgttgcgcacgagcacctttctgagcggcatcatagaaaaatttcagccacgccatttcatctttaccttcggtatagatctcttttccgccaggtttcagtaattcagcaagatcggcaaatacgtcaaaatcgttacgcgcttcaaattgcggagcaacagcctgcttcatcggcacaatatgctggttgctgtaatcaccggtcatcgtcaagtcattgcgctcaaacgatgtggtgatcggtaatacgatatctgcatgtttagcagctgcggtccagtagcattcagaaacgacgatcatctccggtttctgccatgctttaatcagacgattagtatcctggtgatgggtaaagttaccgccacccgcccaccagatcattttgatattcggatacgtttgctctttaccgttatgctgatatttgccgccaggattttccagcgcatcgacgatacgggcaacaggaatcgccgtcattccgccatcatcagcggcctcgctggcctgtccggcaatcgccgcagacatttccggcagcacgccgccaacacgtgtcgggttgccaccattggagtaatgataagagaaaccaaaaccgccgcccggtgtaccaatctgccctaacatcgccgccagcgtcaccagcatccagtgtttctgttcaccatattgctggcgctgaattccccagcctgccatcagcattgtgcgattcgccgccatcagttcagcgagtttgactatctgcgcttccggtacgccagtaatttccgccgcccaggccgcgctcttcggcgtattatcgctcttacctgtcagatactcttcaaactgcggatacccggtggtgtatttttcaaggaacactttatcatgtttgccttgtgtcatcagggtatgcgcaatccctaacatcagtgccacgtcggtgcccatattcggcgcgatccaggtggcattatcaccaaagaattcgatggtttcggtgcggataggatcaatggcaatcactggtttgccagattttttcagctgatggaagtattccagcccttgctcaacggtactgctccaggcaatttttaaggtattcagcgggttcattccccacagcaccacaacctggctgttttccagaatcagcggccaggaggtctgctgttcatacacctctacagaaccgaccacatgcggcatgatcacctgtgctgccccggttgaataatcgccgctatgcccggaataaccgcccgccaggttcatataacgttgcagtaaggtttgcgctttatgcaacacgccagaagagcgccagccgtaagatccggcaaaaatggccgatggtccgttagctttacgaatacgctcatgttgctcatgaatcagttttaatgcctgttcccagctcacctgtacataggtatcttcgcctcgacctttcgccggttgcagtggattatcgagatagctttttctcaccatcggatgctgaatacgcgccgtggtgtgtacctgatccgccgccgtagactgtaaggaattcggtatggttttcgccagcgcgcctgttgaagaaacaatcttgccgtccttcacttctacgttcatcgctccccaacgtcccgcggtgaggattttaccgcccttctcttctgcccatgcggggagcggtgctgccgatgtcaccaccagcgctccagcggcaataccgctgtgtttaataaattcacgtcttgttaatgtcataacttcctccctgatcaacgaggatcactgtttctcggtaatatctttggcgttgtactggaaataccgcgttaaaatgtccagttcgttttcgctcatgctggttcgtgcccccattcctttggcaatggacggccacgcattgacggtgtaatggtcggcggcaataggggcatgacaaccagcgcaataggtatcgtcaagtttttcagcgtattgccatagcggtttacggtccgctaatgcgggatcggtaagcgcaccctgtaaagacgcctgacgccattgattgccgtattcgtcagcctgccattccccgtttaccgtgagcgccttgataccttcttcacttaatgtggctagcgccagccgttgacctgccgccaggtagagcgtgttttcactgccctgcatttgataaccctgcaacagaacgatcggctgtttgccactggcatcaacgacggtgagatcggtaccaggattcacggtagccagctcgcctatgcgagaagttttgaaaggataaatatgtgcgccattagtcactgaagtagcggcctgactttccagctcatgcgccgcgttgtcatccatttttatttctggcggaaaatgggcaatgcctttatgacaatcgatacaggtttcgccgcccttttgtgctttgttatgcattttctgcgcagattcactttgcgaggcaatatccatggcatcaaaagaatggcaactacggcacgttgcagagtcagttgcttttaattctttccatactgtttcggccatttcctggcgatgagtttcgaacttatcgtcactgtctattttgccgctaacaaattcatgataaatatctttagatgcttttaatttagcaaataaataatccatccctgactttggaatatggcaatcggcacattccgcacgtatccctttctggttcgaaaagtggacagttccctgatattcctcaaaaggtttactcatcgagtggcaggaaaggcaaaatgctgtatccgacgttttatgtaaggctttttgcgccagcaataacccgccgccaccaaccacaaccgctatcagcaaaaacaataacccaatgcgttttttccctcgcatagattcctctaaataaattccagaacaccgaaatcattgtataattaaatacacaacgaattaaccacttgcataactcggcacaacactgcctgaaataatcgataaagaatatgatttattacaatgtaatcattaattgctaaggaataacccagttgctatttagaatatatatttatcagttttagcaatttaaatcccataatcaatgtgaatataaaaaatattattagcacaacgctatgttcactgtcacccgctcaacagatcacggttatcgttcgttttttatactgctcagggataaaaaaaggcccctgttgaaattgcaggggcctggtacgagcaagcatcatattgggcgacatgatgcaacggtaaaaatcatttggcctgatggcgttcaatgattcctttcatttcagcaaccgccgccccgtctacgatataacgcgaatactcgtccgcgtgtgcatctgatgacatggacaatccttgattacgataacgcatcggtgaggcttgccacgctcccgcggagctatggacttccagcactccggcatcgaggaagtggtgcaggttttctgcacggactcctgctccggccataatgattggagcatcacgatgggcaataagttccataatttttgataaaccttgcagtgcgtctgatttttgccctgatgtcagtacccgggcaatgcccaattccgcaagattattgagtgtatataaagggttagcgcacatatcgaaggcgcgatgaaaagtcactgccagcggaccggcagcagccattattttttccattcgtggcatatcgacattcccgtcaacatcgagaacgcccgtcaccagtccaggaaaacctaattcgcggaccgtgcgcacatcctcaagaatggcggcaaactcaccgtcgctgtagcaaaaatcaccaccgcgtgggcgaattatcggatgcacagggatcgtcacccgctggcgcacggatttcagtacccccaacgacggcgttaagcccccctcttttggggctgcgcataattcaactctgtctgcgccgttttgctgcgccgttagtgcacattccatgctgtaacagcaaatttccagtaatgccatttttgctccttaattacgctgactgctcgctggcaacgatctcttcaatggaccacggatgaaacttaatagttgttttgccatcggtgaccgccagcgtcggattcggtaatcgctcatgctcaccttttggtgaactggttttaactgagatccccggtaggctgagtccttcatcagaaagcaaagccagcgcacgggcattcagcgtttctggatcacccggcagaacgatttcaatatgttcccaaccttcgtgtgggtaacgtttttccccgggccacggtagctccacaatagaaaactgccagtgcgcaacctgtaccggttcatgcaatttaaacagacaaatcggtctgccattgatcatattttctgacaaaagctcgccacactgttcaaacccgcgacgccagcgctcagcggtgacgttttgatggcaacgcaaagaaatgtgatcggcagtcagcggagtgatattcaaccccagacggcgggaaagttcatctaatgcgtgggtaaatcgcggtaaatccgatgcaatatcctgcagctcatcgatagattgccagttcgccataatcactcttcgtctttcagtaaaagcgttaatttaccctgttgccctgtgtcaaccaaccgctgatttcacgccgcttctgatgcaatagtgaaaacggcaatacgccacgcgcacgttgctgacgaaaacagccatttgcagtatactcccgccctaatttctttaactggtgcgggcaatttttgctcgcttcatcaatgtaaggtattccggtgaatattcaggctcttctctcagaaaagtccgtcaggccatgattgcggcaggcgcgcctgcggattgcgaaccgcaggttcgtcagtcagcaaaagttcagttcggcgactatcaggctaacggcatgatggcagttgctaaaaaactgggtatggcaccgcgacaattagcagagcaggtgctgactcatctggatcttaacggtatcgccagcaaagttgagatcgccggtccaggctttatcaacattttccttgatccggcattcctggctgaacatgttcagcaggcgctggcgtccgatcgtctcggtgttgctacgccagaaaaacagaccattgtggttgactactctgcgccaaacgtggcgaaagagatgcacgtcggtcacctgcgctctaccattattggtgacgcagcagtgcgtactctggagttcctcggtcacaaagtgattcgcgcaaaccacgtcggcgactggggcactcagttcggtatgctgattgcatggctggaaaagcagcagcaggaaaacgccggtgaaatggagctggctgaccttgaaggtttctaccgcgatgcgaaaaagcattacgacgaagatgaagagtttgccgagcgtgcacgtaactacgtggtaaaactgcaaagcggtgacgaatatttccgcgagatgtggcgcaaactggtcgacatcaccatgacgcagaaccagatcacctacgatcgtctcaacgtgacgctgacccgtgatgacgtgatgggcgaaagctctacaacccgatgctgccaggaattgtggcggatctcaaagccaaaggtctggcagtagaaagtgaaggcgcgaccgtcgtattccttgatgagttcaaaaacaaggaaggcgaaccgatgggcgtgatcattcagaagaaagatggcggctatctctacaccaccactgatattgcctgtgcgaaatatcgttatgaaacactgcatgccgatcgcgtgctgtattacatcgactcccgtcagcatcaacacctgatgcaggcatgggcgatcgtccgtaaagcaggctatgtaccggaatccgtaccgctggaacaccacatgttcggcatgatgctgggtaaagacggcaaaccgttcaaaacccgcgcgggtggtacagtgaaactggccgatctgctggatgaagccctggaacgtgcacgccgtctggtggcagaaaagaacccggatatgccagctgacgagctggaaaaactggctaactcggttggtattggtgcggtgaaatatgcggatctctccaaaaaccgcaccacggactacatcttcgactgggacaacatgctggcgtttgagggtaataccgcgccatacatgcagtatgcttacacgcgtgtattgtccgtgttccgtaaggcagaaattaacgaagagcaactggctgcagctccggtaatcatccgtgaagatcgtgaagcgcaactggcagctcgcctgctgcagtttgaagaaaccctcaccgtggttgcccgtgaaggcacgccgcatgtgatgtgtgcttacctgtacgatctggctggtctgttctctggcttctacgagcactgcccgatcctcagcgcagaaaacgaagaagtgcgtaacagccgtctgaaactggcacaactgacagcgaagacgctaaagctgggtctggatacgctgggtattgagacagtagagcgtatgtaatcgatttttcgtgagagtaaagcctgatcagggttacctgatcaggctttttattgccatctaaatgtattctgaaaatggacatgccattgttttctcactgttggataagaggccagaagcgtaatatccggccccagggaaacgataacggttgaatttaaggaataccgcagtgtttaaatttcttgtattaacattaggcattatctcttgccaggcttacgcagaagatacggttatagtaaacgaccatgacatttcagccatcaaagattgttggcaaaaaaattcagatgatgatactgacgttaacgtgatcaaatcatgcctgcgacaagaatacaatctcgtcgatgcgcaattaaataaagcctatggtgaagcttatcgttatatagaacaagtgccacgcacaggtgtaaaaaaacctgataccgaacaacttaacttgcttaaaaaatcacagcgagcctggctggattttagggacaaagaatgtgaattaatcctttcaaatgaggacgttcaggatttaagtgcccttattctgaatcagaatggctctcatgtatgatcatacagaccaatacgcgaactcgccagttgcagctataccgtaactctgaagatttttatccaagccctttgacaagaggataattcacatctttttggcatgttttgttgcaagctattcctgataaataattgcaacaagacatcgagcctttttcactgagttattaaacatactcgcgagcgcgtaatttttttgtccttcagcgataattcacaatcacttcattacgttgtacctttagcggtggaattaaccgcccaccgcctggcacttcccagataaatcgcaacggttctgctgccgctataccggaaaaggccacggtggttccgctctgcccctctaattcgacacaacgagattgcgaacacaagcgaacccgcagtcctgaaggtgtcgggccgataagctgataacgccacgctaccagcgtcatcaatcctgaagcaggttgtcgcgtagaaagaggcgcagatgacatcgactcaccgcgatgatttagcgtaattcctacactacttgcctgccacatcccctccccggcggcttgcaccagcagcggaaacaataatattgctaataaggttctcattatttgccgccaattgtcgccgtcatgcggatatgtcggttatcagacagttccagattcgacaggaccactaactgcggcaagctgcggcgcaggaagcgagacaataatggtcgcagcgcgtggttcaccaacaatactggcggcgcacccagcatctcctgacgggatagcgcttcctgagtttgcgccagtaaacgatccgccagccctggctccagtcctcccccgccctgcagcgcctgtagtaacaaacgttccagcggtgtatcgaggccaataacatggacttcatctttgccaggaaaccactgctgggtaatcgcccgtcccaacgccacgcgcacgacggcggttaattcatgtggatcgctttggatgggcgcatgttccgccagcgtttcgagaatggtgcgcatatcgcgaatcggtactttttcatcgaggagattttgcagcactttatgcagtgtggtgagcgtgacgacgccaggaacgagatcttccgtcagctttggcatctcctgggcgacgcgatccaacagctgttgcgcctcctgacgaccaaacagctctgcggcatgctggctaatgaggtggttaagatgcgttgctaccaccgtgctggcctcaaccactgtgtacccctgaatctgcgcctgttcttttagcgcactttcaatccagatagcattcaggccaaatgccggatcgacggtcgcctcaccaggtaacgtcccggcagcggttccagggttaatcgccagccagcgccccggataagcatcaccactgccaatctccacgcctttcatcaaaatgcgatagcgggcaggttgcagatccatattgtcgcgaatgtgcaccactggcggcagaaatcccatctcctgggcaaatttcttgcggatactgcgtatacggcccaacaactcaccatcctgctggaaatcgaccatcgggatcagtcgataacccacttccattcccagagaatcttccagttgtacatcgttccacgtcgcttcgacaacggtattattctctgccatttttaccggtttgggttcggcaggcgctttttgttcgcgtccgcgtatccaccaggccagcccgagcaatccggcagtgaacagcaaaaataccaggttcggcattccaggcaccaggccgagtaaaccgagcacggcggcgcttaacaacataacgcttgggttactgaaaagctgattcaccatctgctcgccaacatcctgatcggtgctgacacgcgtaacgatgacccccgcggcggtagaaatcaccagcgccggaatttgtgccaccagaccgtcgccaatggtcaatagcgtataactttccgccgcgtgtcccatgctcatgccatgttgcagcacgccgaccagcaacccgccgacaacgttaatgaccatgatgaggatcccggcgatggcatcgccgcgaacaaacttacttgccccgtccattgagccgtaaaaatcggcttcctgagtcacttcggagcggcgttttttcgcctcatcttcaccaatcaatccggcgttaaggtcggcgtcaatcgccatctgcttacccggcataccatcgagaacaaagcgcgcacccacttctgcgatacgcccggcacctttggtaatgaccataaagttgatgatcacaagaatgacaaacaccacgataccgatagcgaaattgccaccaacgaggaagtgaccgaacgcttcgaccaccttccctgccgccgccgcgccggtatgcccttccattaaaatgatacgggttgaagccacgttaagtgccagacgcaacagcgtggtaaacaacagaatggtcggaaacgcagcaaactcaagcgtgcgctgggtaaacatcgccaccagcaacaccatgatcgacaaggcaatattgaaggtaaacaacaggtcgagtatgaatgcgggcagtggcagcaccatcatcgacaagatcaacaggatcaaaatcggtccggcaaggatctgccattgtgtcgatttcaggtttgcgggcaggcgcagcatcgcggccagattactcatgggtcggtttctcgttaataaaatccagggcttccggcaccggaagatgagtaggttgtacagggcgctgtccaccagccagacgccagcgtttcagttgccagacccaggccagcacttccgccaccgcggcgtacagttgacccgggatttgttgaccaatctccgcatgtcgatacagcgctcgcgccagcggcggcgcttcaagcgtcgggacgttattttcagcgccaatttcacgaatgcgcagcgcgaccagccctgcacctttagcgaccactttcggtgcgctcattttgttttcgtcatactgcaacgctaccgaatagtgggtcgggttattgacaatgacatccgctttcggcacatcggccatcatccgacgccgtgcggcagctcgctgcatctgacggatccgtcctttaacatgggggtcgccttcgctttgtttgaactcatcacgaatatcctgccgcgacattcgcagctttttcaggtggctgaagatttggaaaaagacgtcaaatcccaccattggaatgacaccaagcaccaccagcagtgcgcatagccctaccaaatccatcgcattacccatggcggtaatcggagactcggccattaagcgcatcatctgcggccagtgatgccagagaaaaaaccccgtcacgctgccaaccaggatggttttcaaaattgctttaagcaactccgcgccagtctgagccgagaacatccgtttaatgcccggtagcgggttgagtttggaaaacttcggctgcaaggatttgccgctaaataccagccctcccagcatgaccggagaaatgagcgccaccagtaccacgccgctaatcagtggcagcagcgccagcatggcttctctgatcagcagaataatctgcccgaggatcagattcgggtctttgataatactgtgatcaaaatgcagcccagcggagagcatgcccgacaatcgacgggccagcgacacaccgccaaaccagataacactaacgcccaccagcaaaatcagcagtgaggtcagttcacgggaacgcgggatttgcccctcttcccgcgctttttctagtcggtgaggtgtgggggcttctgttttgtcgtcgctctcgtcagacacgtcgccaatcctggaaagagtattaagcgtgaatgatgccagagcgcaaagcgttcaatggtttgagtaaggggcaaaacaggcgggatttagggcttttgctgccacacatcaagcatagtgtgcgtttgtcggatgcggcgtcatcgccttatcagaccgcctgatatgacgtggtcacgccacatcaggcaatacaaatcaaaatccaagactatccaacaaatcgtccacctgatcctgactggctaccacaccggctttgctggtatcgacctgaggtccattaagcaaactctggttttcacgttttggacgcgactcctgttccgggatgttttccaacagcaccatcagcaactggcgttcgatctcctgaatgacatccatcatccgcttaatgacctgcccggtgagatcctgaaaatcctgcgccatcatgatttccagcagttgcgcgttagtaaagctggtatgcgcgggtacatctgccagaaattgtcgtgtatctgttaccagttcacgggcgtcggcaaggtcaatcggatcggcaaaccagtcatcccaacgttgggttaacgcttttgctgatttctccatttgatcctgatgcggttgtgacgcctcaacactgttcagcgcccgctccgcagcctgggcggtcatctgcacaacatagtacaaacgatcgcgcgcatcggggatggcttccgccgcttcggcaatggcctgatccagccccagttcccgcaaactgtcgcgcagcatacgcgtcaggctgccgatgcgcgcaatgatatcgccagctgaatgctcgtcagcaggtttgattgatggttgcatcatagtcgcatcctcacatgcccagtttctcaaagattttgttgagtttttcctccagcgtcgcggcggtaaatggcttcaccacatagccactggcccccgcttgcgccgcagcaatgatgttctctttcttcgcttctgcagtcaccattaacactggcaatgccgacatcgcgccatccgcacgaattgttttcagcaattccaggccatccatattgggcatgttccagtcggagataacaaatccataaccgcctgcctgcaacttattgagagcgtcgacgccatcttccgcttcctcaacattattgaatcccagctctttcagcaggttacgcactatgcgtcgcatggtggaaaagtcatccacaaccaaaaatttaagttctttatccgccatttcacactcctgatttaaatacgtatcgcctgtccggcactaatttttgccaacatttgctggcttacctggctaagatcgaccacttcgcagacaccacccatattgatggcctcgcgcggcatgccgaacaccacgcaacttgcttcgttttgcgcaagggtccatgcccccgcctgacgcatcgccaacattcccgccgcgccgtcgttgcccataccggtcaggatcaccccaaccgcattacgccccgcctgtttggcgacagaatggaacaacacatctaccgaaggccgatgacggttaaccgccgggccatcgtgaattttgatttggtaatttgcgccactacgcgacagctccatatgccgatcgcccggcgcaatataggcatgccccggcaagacacgttctccgtcttcggcttctttaaccccgatctggcaaagcttattaagtctgtcggcaaaagagcgggtgaaaccgggcggcatatgctgggtaattaacaatgccgggctggaaagcggcaacggttgcagtacgtgacgaattgcctcagttccacccgttgaagcaccaatcgcaatcagtttttcagaactcaacaacggacccgccttcagcgttgtcggtgctgacaatggcttatgtgctgcaaggctcgcctttgctgctgtacgcaccttttcagcaatcatttcgctatacgccagcattccttcgcgaatacccagttgcggtttggtgacaaaatctatcgcccccagctccagcgcgcgcagcgtgacttctgaccctttgccagtcagggaagaaaccatcactacgggcattggacgcaaacgcattaatttttcgaggaaatccagtccgtccatccgcggcatttcaacatccagcgtcagcacatcgggattgaatttcttaatcaagtcacgcgcgaccagcggatcaggcgcggtcgccaccatttccatgtcgctatggctgttgatgatttctgtcatgatctggcgcatcagtgccgaatcatcgacagataacaccctgattttgctcatctttaatccttacttagcgcatacaccgtctgaccacgcagcgtgaagcggcgctcaaggtggctaaagttttcagagtgacccgcaaacagcaatccgtcgggtttaaggagcggaacaaagcggcgcaaaatctcctgctgggtattttgatcgaagtagatcatgacgttacgacagaagatcgcatcaaacggccccggcacggtgtactgtttcgccagtagattcagcggggcaaaatcaacatagttcgccagctcctgacgcacgcgtaccagcccttcatgcggtcccgtccctcgcatgaaataccgttgcagttgctgcggcgtcaggtttttcaactcttcatggcgataaataccgcttctggctttttccagcacttcggtgtcgatatcactggcaaacactttccagcgtccgggcgcggtgcccaatgtgtcagccagcgtcatcgcaatgctgtacggctcttcgccggtcgaagccgccgcgctccatacgcgatactcgccagaacggcgacgtgcgtgatccgcgagcagagggaaatggtgtgcctcacggaaaaatgccgtcagattcgtggtcagcgaattgataaacgcctgccactcaccgctgtgctgattagattccagcaagttcagataatgaccgaaatccgtcagtcccagcgaacgcaaacgacgaaccagtcggttgtaaaccatgtcgcgtttatggtcagccagaacgatcccggctcgttgatagatcaattgacttatccgccgaaaatgcgcgtcggaaagcgccaggcgctcggtcatctgtaacaataaagacgtttgcccacagggcagagatgaagtcatagcgccttctcaatcacttcaggataccactggcgcaatttgtaactgcaccgactcatgtcgtgctacttcatgttcttcaagggtaaataccgccacacgcgacgaaagatggtcggcctgattcgccagttgttccgttgccaccgccgcttcttctaccagcgaggcgttctgctgagtcacctgatccatctggctgacagcctgtgcaacctgctcaatcccccgctgttgttcttccgacgcagaggcaatttctcccataatgtcgttcacgcgggtcaccgaactgacaatatcgatcatggtcgcggcggcgttattcaccagtttcgaaccctgctggacacgattgactgactcttcgatcagccctttgatctcttttgctgcctgcgcgctacggctggcaagattgcgcacttcacctgccactaccgcaaaaccacgcccctgctctccggcgcgagccgcttccactgccgcattcagggccagaatattggtctggaaagcaattccgtcgataacgctgataatgtcgccaattttttgcgagctggtggcgatctcctgcatggtgtgagtcatggtactgacctgaacaccgcccgcctgcgccgttgtcgcggcattttttgccagttccgacgcctgtcgtgcgttatcggcgttttgccctaccgtggcggttaattgctccatactggcggccgtttgtgccagcgatgccgcctgctgttcggtacgacttgagagatcgttattgcctgcgacaatctccgcgataccaatgtgcatctcctggcttcccttacgcacatcacttaccgtcccacgcaaagcctgctgcatggtcttcagactggcaaaaatggcggtgatctcattacgaccatataccgcaatcggacgcgccagattacccgcagcaatgctgtcaaaatggctaccgataatggccagtggttgaacaatcatcttgcgcgtccaccacagcgcactgctgatgtagatcgccgcaacaataatcatgctgataaacaccagtgccgaaatctgatagttacgctggctttgcgcactggcggcttccagcacatggttgatctccagctgccaggcctcaaagttaacgtcaaacgcattctgtgatccctgcaccggcgcagtgaggaaatccgaaagttgattactttcaagccaggtcgcctgatgttcgagatcgttgtgccagcgggcaaaacttttctccgtctctttttgcaatgccctgacgtgctcgttgcccgcagtcatcgccataaaacttttaaacagcgtggtggattgcgtcagactggcgcgcgccgtcgtcatcaacgttttaatgtcatccgccggatagctaagtgccgtcagagtgcccgctttgttcagcgcggtactggcctgtaacattaccgcccgagtttgcgctaatgccgcacgttgctgattgctctgctcgacctgattcagtcgttgcaaatcgtcgcgaaatgcccaaaaagacatgccgttactgccaatctgcaagatcccgcagagaatcaaaattaaaaacagcgtggtcgaaattcgaatacgattaaacatcaacgctccccatcaggcggcaatgaccgcgttagtaaatactcgtcaaaatgtttcccagtttggatcttgttcagcaattcgcagtcgtggctgagccggtggttgctcactggcaggacgggatggtgtttgcggtttattggtgagtgggctggctgccagacggaacgcggaaaccgcttgcgttaaacgactcgcctgttcttccagcgcagcggcggcggcagctgattcctgcaccagcgatgcgttctgttgcgtgacgcgatccatttccgaaaccgccaatgcgacttgatcgatgccacggctctgttcatccgatgccgatgcaatctcgcccataatgtcagtcacgcgagtgacagcattgacgatattgttcattgtttccccggcgctttcgaccagcaccgaaccggtatcaacgcgtgcgacggagtcttcaatgagggctttgatctcttttgccgcctgggcgctgcgactggcaagattacgcacttcacccgccaccacggcaaaaccacggccctgttcacccgcacgcgcggcttcaaccgcggcattcagcgcgaggatattagtctggaaggcaataccgtcgataacgctgataatgtcggcaattttcttcgaactatcggcgatctcatgcatcgttttcactacgccatccaccactttgccgccgtgctgggcggtgtcggaggcacttcgcgccagttgcgaggcctggcgggcgttatcggcgttttgcttcactgtcgcggtgagctgctccatgctggcggcagtttcttccagcgcggatgcctgctgttcagtacgggaggaaagatcggtgttgcccgccgcaatttcacgggtaccggcatagatggcatctgaaccttcgcggacatgagtgacggtgtcagtcaaagagcgttgcatatgtgaaacgctctgcgccaggtcgcccatttcactgcgcccgtcaatggtcagggtattcgccaggttaccaccggcgatttcgcgaatgtgagcaataatttttgccagcggagtaagcaacatacggcgaatgccgtaccacgccaccagcagaatcaataccaccaccagcgcgataaccgccagttgccactgggcaaatcggtaatcatctgcgttgtcagtgacgatatcgcgatacagtttttcactgctgagggcgtactgagcaaacgcttcgcccattgcattttgcattccctgggttggctgagcgaaataagctccagtattgccataatctagataatcaatcagttcagttaacgctgtgtaatagtttttatatttttcatcaatattacgactggtagcgaccatttcaggtaacggtgccatgcttttgaattttttataatgcgtcgctgcctgcgccaatgttttcctggcgctatcgagcaattcaactttggcgttactttgttgattggaggaatccatcatcatccgtaccgctgaacgactcaggttaatgcgcgtttgcagcattaaatcccaggttgacgtcagctcgccctgctgttcccgtaattgattggaaaccacaaagctcttctggctatggtgaagggaagaaaaaaacagactgccggaaataagctgtaacagtgcgaatacccccagcaccattaccaacagcgtgactacgcggatacggttaatcataaggcaccttcctgaaaacaagttgatctcgttatcggcaaggaggggggaaactttattgctgatgccacccgccgcgaaattgaaataaaaaacccgatgcgcagatcatcgggttcatttcaattgaggaaatcgggagaattacgccacttctgacgccgcgctatctaacagcgccatctcttcgctgttcagcagtttttcgatgttcaccagaatcaacatccggtcgcccagtgcgcccagtccagtgagatattctgttgaaagcgtcacggcaaattccggtgccggacgaatttgctccgccgtcaatgaaagcacgtctgagacgccgtcaaccacgatgccgaccacccgctgtccgagattcaggacgataactaccgtgttgtcgttatagtccacatccacctggctgaacttaattcgtaagtcaacaatcggcacaataacgccgcgcagattcgtgacgcctttgataaacgctggcgtgttcgcaatccgtgttacctgatcgtagccacggatctcctgcactttcaggatatcaataccgtactcttcatcaccaagggtaaataccagaaattcctggcctgacggctcgctggccagctttgttacattcgtcataccggtcatattgttacctttttactcattcaggcggcggtgttcgccatacgttgttcgcggtttatcgcctgcaaggcggagacatcaacaatcagtgccacgctgccgtcgccaagaatggtcgcagcagaaatgccggggactttgcgatagttactttcaaggtttttaaccacaacctggtgttgaccaattaattgatccaccagcaaggcgtagcggcgaccgccactttgtaagatcaccacaattccctgggtggcttcggttttcgcgcccgcgacgttgaacactttccacagttcgacgatgggcagatattcaccccgcacttccagcacccgctcgccgccggccagtggatggagatcggcttcacggggttgcagtgattccataacagcattcagcggcagaatgaaaacttcatccgcaacgcgtacggacatgccgtcgaggatggccagcgtcagcggcagtaaaatgcggatcgtagtgccagtaccctgcttcgactggatttcgacatgaccgcccatctcctggatattacgtttaacgacgtccatgccgacgccgcgcccggagacgtcggtgacctgctctgccgtggagaagccaggtgcaaatatcagcatcgcgacttcgtcgtcgctcatgttttcgctgacagtcaaaccttgcgaggccgcttttgccagaattcgctcacggtttagccccgccccatcgtcggtcacttcaatgcaaatgttaccgccctgatgttcggcagacagaattaaatttccgacgctgtttttacctgcggcgagccgtttttctggcagttcaataccgtgatcgaggctattgcgtaccaggtgggtcagcgggtcgataatgcgttctatcaggcttttgtcgagttcagtagaactgcccaccagcgtcagttctacctgcttgccgagttttcccgccagatcacgcaccagccggggatagcgactaaaaacatattccatcggcatcatgcgaatcgacatcactgattcctgcaaatcacgggcgttacgttgtaactgccccatgctggttatcaaatcaccatgattaaccgggtccagttcgctggaacgctgggcaagcatggactgggtgataaccagctcgccgacgaggttaattaattgatcaaccttttctaccgctacacggatgctggtggattcattgctgcgcgtcgttttttcccgctccacgcggccggttggcgcttgttcggctgccagtttaagcactggtggggtggatatttttggcgagacttctactgtttcaaaggtaatctgatcggcttcaatcacaaaacagagtaccgctgtgatgtcatcttcggcgatgtcgcccggtaatattgccgagagcgaatccgcccctttcaccacgtcagttaacgttgtcagatgtcccagttcttcttccagcaggtcgacttccccggcctcaggcgcgaaaggataattcgtcgcggcgactgactgcgactctgctcatcttgcggttcacttttggcaaccacacttaatcgggtcactgcggatggcgtttcgcctttcgcttctaatgccagttgacgcaaggcctggcagatataatcgaagctggcggcatccggctcttgcgactgtttataagcgtcgagctgttcttgcatgatgtccttcgtttccaaaaacagattgataatgtcggtgttgagttgcatctcacctcgtctggcttcatcgagcaggttttccatcagatgcgtggtttcctgcaaaacgctgaagccaaaagttcctgcccctcctttgatcgagtgggcagcccgaaagatggcattcaattgttcggcatctggcgcttccggctgcaaaaccagcaaatgctgctccatgtcagccaacagttcgtccgcttcatcaaaaaatgtctgataaaaatcgcttatatccatgctcacgctgtcacctcggttcggctgatggcattgtgggaacactgacctgtggtgcaacctcaggtttttccagggcgcttactggctcattctggctttcggcgttttcatgcaaaatggcctgttcggcttgtttgttcagtaccagcaggctgatgcgacggttgacggcatcatcaggtccgcgatcgcttaagcgcatcgttgccgccatgccgacgacacgtaacactttgccgctatccaaccctccgaccatcagttcgcggcgggatgcattggcccgatcggcagaaagctcccagttgctatatcctttctcaccgctggcgtaggggaaatcatcggtatgacctgaaaggctaatacggttgggaataccgttcagtacaggcgcaatggcgcgcagaatgtcgcgcatatagggttcgacatcggcactgccggttctaaacatcgggcgattctggctatcgatgatctgaatacgtagaccttcctggaccagatcgattttgagatggggacgtaacgcccgcagtttcggatcggactctatcaactggtcgagatcaccccgcaatttccgcaatcgactttgctccatgcgttttttcagctcttcgatgttcggctgcttattcacttccccctggctttgggtgtaatcatcaccaccgccgggaattgggctttcactattagaaatgcgatcgccgcccgtaaccgcagtcgccagtggagtccggaagtactccgcaatctgaatcagctcttttgggctggagatggagatcagccacatcaccagaaaaaaggccatcatcgcagtcataaagtcggcataagcaatcttccacgatccatgtgctgccccgtggcttttggctttgcgtcgtttgacgacaataatcggatgcgcttgattcttcatgcttcctcggttgtcgtctgttgttgcggatttttcaccgcacgcacatgctcttccagttcaataaacgacggacgttcgctggaatagagcgttttgcgaccaaactcaacggcgataggcggtgcgtaaccgttcagattagaaagcagagtgactttgacgcactgcatcattttgctggtttcggcgcttttctgacgtaaaacagtcgctaatggggaaataaatccgtaagccaataaaatgccgaggaaagtccccaccatcgcatgtgcgataagcgcacccagctcggcggcaggacgatcggctgaacctaacgcgtgaacgacccccattacagccgcaacaataccaaacgccggaagtgagtccccgaccagcgccagactgttcgccgggacttctgcctcgctttcgtgcgtctcaatctcttcatccatcagggcttcgatttcgaaggtgttcatgtgaccgctgataatcaggcgcagataatcgacgataaaatcaagcatgacgctatccgcgaggatgcgtgggtagctggcgaagatctcgctctcacggggattttcaatatcacgttccagcgaaaacatccccatctgccgcgattttgccatcaaccgataaagcagagccagcagatccatatacattgctttggtgtatttggagcgacgaaacagcaacggcagcgccttcagcgtgcctttaatcgctttgccattattgccgacgataaacgacccaatccctgcaccggcaataatcaccagttcagcgggttgatagagtgctccaaggcttccaccggtcatcaaataaccgccgaaaactgtaccgagaacaaccaggtaacctaataagataagcacgacatcatccttccactgttgaccatgacaggatgttcagtcgtcaggcgttaacgcgcgattggggcaaaaaaaagcagcggtacgtcgttaccgctgctggaatgttgcgcctcaccgtatcagttaaacagcctgtactctctgttcatccagcagttgtgggataatatcggcaggattctgggaaagtttacgtctttttactgccctggatggcggttgacataagctgcaggcaaagctgccaacaggctggtgagcgtgggtaataaaattgccgccgcagcagttgcagctggaaagttgcagtaatccactttcaacaaaccgcaccaatgtccaggcacgagttaatgccagcagtggtccttcttctgcttgtgggcactgttcaaggtataaacggtaggctttgatcaccgcatcgacgccattacacaaaccggttttcagtaaaaactgccatgcattacagaacatcgaagcatgaacgttttgttcccaggtcataaaccagtcggttgagaatggcagcatgcctttcggcggtgggcttccgcgcagttctttataaagttttatcaggcgtccgcgacttaactgtgtttcgctttccagcatctgcaaacgagcgcccagggtgatcaattccattgccagctgaatatcccgcgcttcctgaacaatgcttttttcactcatgatcaggcccttttcttgcgcagcgcttcttcaggctgattaacatcattcagcaagcgtgttgagagcatgatgccggtatgaatttgctggagatcgtcaacgcgggaatcttgcgtcaactgagtaatcgtctggtggctgtcaaaacggaagtgacaaaccagctgattggtttctgccagcttaaccatttgcggaagagtcagtgccgctaatgttgtcgccatttcttcatttatgccgagacgaaacatagcggacgctttgtcctgaacaatcagacgctgtgcaagtagtaaatatgacaagttgatgtcataaatgtgtttcagcaactcggaggtatgcattattcccacccagaataaccaactttatttttatgcggtttcaccgcaccctgtgatgtcgccgggaagcccggtaaaataattagcattagaatagttgcgataagctgcaataagcagagccacctttttggtttaataagtccttacaaatagaagggggtctttacacttatctaagatttttcctaaatcgacgcaactgtactcgtcactacacgcacatacaacggaggggggctgcgattttcaataatgtgtgatacagatcacacaaaacactcaattacttaacataaatgtataagtcatacttttgttttgggtgtatttcaatctgttaaaaagtttttcgctacgctagcaagcaaaaatgaaacaggaataatcgaaatgggatgttgcgcacagttaaaataactcaccgtaaataatcatctgccataaataatcactttcatgcaataccagataagctatttttaaacagacacttaccgcacaacaaactaattaaatacaaagaaaggcaacaatcaacataatgttaatgaaatgttttacatatattaaccacttgtttaatgcggagaatcagtacactattttcttataattacatttgaaattatatgatcaccgggagtgattgattaattgtctttactaataatcagactaatatttacctgtttgaccgagttgggattgcgtcgtttctccattaggagtaaagctttaatgtcacctgaagttcacagaataaggaacaggttatgagctatagcaatattcttgtcgctgttgcggttacaccggaaagtcagcaactgctggcaaaagcggtatctatcgccaggccagtaaagggacacatcagtttaattactctcgcttccgacccggaaatgtacaatcaattagccgcgccgatgcttgaagatttacgcagcgtgatgcaagaagaaacgcaaagctttcttgataagttaattcaggatacggggtatcccgttgacaagacgtttattgcctacggtgagttaagcgaacatattctggaagtatgtcacaaacatcatttcgatttggtgatttgcggtaatcacaatcacagtttcttttcgcgagcatcctgctcggcgaaaagagtgattgcctcaagtgaggtcgatgtgctgttagttccacttacgggtgattaaccgctcctacgcaagctttggaaaggtagcaactttatcgcgctgctggctttccgcgcttcgcggaactatctgctttaggtcgctaatgaagcactcctgccagtggttaatatcgtttttcacgataacgtccagcatttctgcatgacgggaaatacgttccgccagcgacatagtcaatgcacgatccagcgcagctgcaacttcgtcacgatcgtaggggttaacaattaacgccgacgttaactcgtttgccgctcccgcaaattgcgaaagaacaagaacgcccgggttggctgggtcctgagcagcaacatactcttttgctaccaggttcatcccgtcacgcagtggcgtcactaagcccacgtcagagtagcggaatattttcatcagtaatttacggtcaaaatgctgattcaaataataaagcggcgtccagcctaattgcccgtatttaccattaattcgtccagcttcattttcgagctgatgacgaatatcctgataggcttgcacatcaccacgcgacgttggtgcaatctgggtataacgaattttaccatgatgctgcggatatttttccagcaacgcttcataggcgagaaaacgctctggcaaacctttggaataatccagccgttcgacagaaaagatattttgtacgtttttcagttccgctttaagttgcgccagttttggcggcagtggcccggcagcctgtttggctatttctttcggttcaatgccgatcgggtagacttctgttcgaaatgctttgccccaggctgtatggctttttgcgctacgtgtcgtgacgcgggtcaggttagaaagacaatccaggaacgccagacgatcgttttctgtctggaaacccagcaaatcataatcacaaagctgttcaagcaaggtgtcatatgtcggcagcgcgttgaagatttccggtgtcgggaaaggaatatgcagaaagaaaccaatgcgattattcactccccgtttgcgtaattcatgcgcaaatggcaacaggtgataatcgtggatccagataatgtcatcgtcttgcaacagcggcagtaatttatctgccagcaacgcatttacgcgtagatagccgtcccaggcaggacgctgaaattgcaccagatcgagccgataatgaaaagcgggccagagaacggcattggagaattggttgtagtattcgtcaaggtcctgttcgctgaggttaaaagaggcccacgtaatgttaccttttttcaccttttttagcggctgatcctcattccctgtttcgccactccagccaaaccacagtccgcctgcggctttcagtgcccccagtatgccaacggcaaggccaccggcactggcggcgtgctcgtctggtggtgcaatccggttagatactacgactaaacgactcatagtcatcactcctgttattttctcttttttgttgtaatgcggtggttatcatttcaagccagctccagacatccggcacacccgccagtcgccatgatgcctgagttgcacctgtgccaatttttactgacattccgcccagccggttaacggctgcgaagccagattcatcggttaaatcatcgcccagaaatacgggcgttcgcccgataaagggagcttcctgcataaaagctgcaatcgcctcacctttactggtacctctcggtttgatctcgacaacacactttccctgctgtaacgccatttgtggccagatctgagtaatacgttgcgctaatgtcattaatgcgtcttcatgctgcggagcctgacgataatgcagcgcaaaggccatccctttcgtctccagctccgcaccgggatactgggcgatgaccgtatgcagttgcacgctaatatcacgcgcaatcgcatccggcagatgaacgatatgtgttttaccattgatgtcacggcgctccgccccatgcacgcccgctaacgggaagcgataaggttttgccagtgcgtcaagctccaccattgagcgccctgatatcaatgccaatgcaccatcacttgcggttgccagtagctgtagtccttgcagaatgttgtcaggcacgacgacctgatcgggatgcggtttgatttccgccagcgttccatcgagatcaaaaaaccaggcatatttcgcggatagttcaggggtttcggttaacggttctgtcacccggttctcctccttctcttttcttattgtgttgcgcagaacgcgctttacagacatgtaagtatagacagtgtgacgggggtcgccatttgcaacgaagaacagccaaccgttatggcggttggctatggtgggaaaaaacgctaaattgttgcagaaaaaagcatcagacagtgcgtttcgctttttgcttgtaacggtcgaagatcaccgctgccagcaggattaagccgcgaaccacgtactgcgcgaaaggagaaatatttagcaggttcatggcgttttccacggtgcctaaaattaagatacccgccaccacatatgagatttttccgatgccacctttcagagaaacgccacctaaaacgcaggcggagataacaatcagctcataaccaatcgacgtcattggctgcccactggtcatacgtgaagccagaataattccggctatcgctgataccaggcctgagagaacaaagataataattttggtgcgaacaaccggtacacccgccagacgcgcggcctcttcgttcccgccaatcgccagggtgttacgaccaaaggtggttttattcagcagcaaaccaaagataatcagacacgcgacggtgagccagattggcgcaggcagaccgaaccagttggcgtaaccaagggcaaagaagctttcatcttcgataccgaccgctttaccgtctgaaatgatgtacgccagacctcgaacaatctgcatcgttgccaatgtcgtgatcagagcatttattttcagtttggcgataacaaagccattgaccaggccacagagaacgcccagcaacaaccccgctgccacgccaatccacaggctttcagtcaggttaataaccaccgccgtggtgacacccgcacaggcaattacggaggcgacagaaaggtcaaagtcaccggaagcgaggcagaacaacatgccacaagccaccatccccgacatggaaattgccaggcccaaccctttcatattaatgaaggtggcaaaatttgggacaaaaatggcacaggcgataaagagcaccgcaaacaccaccagcatgccgtactgatcccagatacgcccgaagctgaatgacgacttaggtgcgccagaccccgatgtagaaacagaagacatcatactctccttactcaggcaacagcctggctgactttaggcatcgcaaggctcagtgcctgacgctcatctgcctgctcgtgtaacaattcaccggcgatttcaccttcccgcatcaccacaatccggtcggcaacgccgaggacttcaggtaagtcgctggaggcaaacagcaccgccacgccctgcgccgccagcgcataaattacgttatatatttcgtgcttagcgccaacatcaatgccgcgcgtaggttcatccagcaaaatgaccttcatctcttccgataaccagcggcccagaatggctttttgctgatttccgcctgagagattcatgatcagttgctccgcgcccggcgttttgatgttgagcgaacgaatgtggtgatcggcattgttttcttcccaaccgttgttgattacacaaccgccgagcacatgtttacgtctggcactgatgttgatattgtcgcgaacggagtgcacgggaataatgccttccgctttgcgatcttccgggcagagcatcatgcctgcggcaatggcgtggctcggtttacgaatatcgatcggctgttggtcgatataaacctgaccggcggtgatttgcgtcccgccaaacatgcctttcattaattcgctacgccccgcccctaccagaccaaacagcccaacaatttcaccactgcgaaccgccagacttattggcgtacgcacgcctggtgctttcacagcatcaagacgtaggcgctcctcgccataactacgcggttgccagccgtagatatcgccaatgtcgcgcccgaccatcgcctgcaccagcgcgtcgtggtcaacctgctgcatatcggtaaaggttttgacataacgtccatctttaaagacagtaatggcatcgctgagggcaaatatttcttccatacggtgagaaacgtataagatcacccgcccctcttttcgcagttcacgaataacgcggaaaagattgtcgatttcacgggcagagagggagctggttggctcatcaaaggcgataattttggcgttacgcgccagcgctttggcgatttcaaccatctgccactgaccaatggagagatatttcagcggcgtgtccgggtcaatatccataccaagatgtttaagttgtaaacccgcctcataattcagcaatgagcgattcacaatgccgcctttatgcggcagctggccgagatagatgttttccgcgacggtcatttccggcacgagatgcagttcctggtaaataatcgccacgcccgcgttaagtgctgcggtcgtgtcggaaaaggacatttcctgcccattaatcactacagaacccgtggttggcgcatagttgccgctgaggatttttaagagagttgattttcctgcgccattttcacccatcaacgcatgaacctgaccggcatagcagtcaaaactaatatccgtcagcgccttaacgccgggaaacgttttaccgatgccgcgaaatgagagatacggggtagactgttgcataacgtctccgtgaatcactggtcgttcacaccccctctgcatcatgcagaggggaatttttccggcaaattacttaccgcctaaaccttttttctccagttcttctttaaagttgtcacgcgtgatcagtaccacgtcggtaacttcggtaaattttggcggttcaacgtcttttgctacccagttgtaaagcatttcgctggatttatagccatgaacatccgggcttggcagcagggaaccgtagaagccggttgcctgtgctttagacagttcgcttacggcatccacaccgttaataccaataccgatgatatcggctgctttaaagccctgaccttcggttgcacgtacgccgccaagtacggtgctgtcgttcataccgacgatcagccaatgtttaacttccggatgttgaaccagcattgagttggcagcgtcaaatgcccccgggatgtcgttagatttggtaggtacctgataaatttgtttttccgggaatccggccgctttcagtgcgtccatagaacccgttgtacggcggcgggcggtatccagttcgttggcggtaatcgccatcaccgcgctttctttgacatcccaaccccgtttctgcatctctttatacagttcctggccctgacgttcgccaattttagtcgccgccatcatcaccagcggaacggtatccattggcttacctttggcgttaacaaactggtcatccacggcaatgactttcatatcgtagccacgcgctttcgcgacgatggcagagccgagtttggggtccggagtacaaataacgaaaccttttgcgccactggctgccaggctgtcgatcgcgttcaatgttttttcgccatccggcacggcaatcttaataacctcaaaccctaaatccttcccggctttatcggcaaacttccattcggtctggaaccacggctcttccggttgcttcaccaggaaaccgagcttcaggttctccgccatagcggattgtgacataacggctgccagaccaatggctgccagggctttagtaaatttgtgcatggttctctccagctttagtgtcgttttgtgtagggcaaaaacgaatgacattcgttaaattaatcggaaaacaaagcattaccttttaactaaaagataagtgactgtgttgacatagttttagcgagaaattaattctccataggagagcaatatcacatcgcagaattacagtgagaacgtgcataaatttagcgggaaaagacataagggaaagccaatttgtcagacaaattgtcgaatgcacagcagattaatccataagattagcctggaaatccttgttgtctttggtacccatgcgggatgtcttctttttaaccagtcaataggccgcattacctggcgttgagtttttgaaatggtgtaataaccgcaactcaaagatgtggaaaatgcacgtcattcatttcgtcattaattatcactgtgctcattaattaacagaacacgtataatgagagccatctcgcaaaaatgaaaaaacgttttataaaatcatcacttcatcatgaattcaaattcattgattaatatcaacaagatacaaaaagcactatcattaaaattcattgcagttacattgatttcatcaatgaaatgtaaaaatatataaacttgatgatttaagcattttcttatacccgttcagacgttattcttatttcagatcatcgtcagaattgactccacgatcacatttcggaccggcagaaaggaattattctgcaaacagtaattatggtgttttgatttatcttgcacctctccacttctggatataaggatattaggtatggcaaccgctggaatgcttctcaaactcaactctcaaatgaaccgcgagttttacgcatccaatctctaccttcacctgagtaactggtgttctgaacagagtctgaacggcaccgccactttccttcgcgcccaggcacagagtaatgtgacccaaatgatgcgcatgtttaactttatgaagagtgtcggcgctacccccatcgttaaagccattgatgttcccggtgaaaaactgaactctctggaagaactgttccaaaaaacgatggaagaatacgagcaacgttctagtacgttggcacagttagccgatgaagcgaaagaactgaatgatgattcaaccgtcaatttcctgcgcgatctggaaaaagaacagcagcatgatggtctgttgctgcaaaccattcttgatgaagtgcgcagtgcgaaacttgcgggtatgtgccctgtgcagaccgaccaacatgttctgaatgtcgtgtcacaccagctgcattgatcatcatcggcgctaatgcattgcgccgatgaaggttttgagaaaccgctgcctcatctgtttgaagcagcggtttttttaatgggattcaccctgtggggtaaacttgagttcaataagcgcgatggctttttggattgcccgcatggtgaccgggtctgcggcggcgggatggttagtaaagtcgatattcttcagctgactggacattttttcacgaacttcaacgggcgcgattacatcgagaacatccagaatttgtttgataaccaactggcaagcaaccacatcagaaaccagttcctgatcggcattcagcggctgggacatcgtaaactcctgatagcattttgaaagccgttatagtagcggcttcacatcttcagcgatagtcacatccaccgtcatcaggacacaaaaaaacctgccggagcaggttttttgttatcggaacatattgcctggcggtacgtctttgaacgtcttgcaatagttattgaacatacttttcagtattttgcgcagtttcatcgcggcactccgaccatttgttatacaggtgttattgtctttgcacttataatatgacaaccatcacaaaaatcaatctttatgtgatgtgaatcacataaatacccctttaatgttataaaaatgataattaaaaagcagctaccccatttctgacacctacagatggcaagaaatagcgcctgccaggcgtcttttccggccattgtcgcagcgctgtaacgcgtaaaatagtgctttcttttactcttctggctggaccatgagacttctgattctgactctttcattaataacgctggcggggtgtacggttactcgccaggcccatgtgagcgaagttgacgcggcaacaggtattgtacggttggtttatgaccaggcttttttgcagcatgcccgtaccgatcgttatgtcagtcgcgggatcgccgatcgcgcatgccagcaggaaggctatacccacgctatcccctttggtcagccagtaggcaactgtagcctttttgcgggttccttatgtttaaatacggaattcactttgtcatatcagtgccatcattccgccttccctgtctttctctaaatgttttaatcagcgagggggatcttcgctgattaaataaatagcggtaatgcgttttattcccattcgtatttttaataaatgaagtttatattttaccttttgcaaataataaaataacaaattatagtgacgccacagcaacaaatataacctttgtggagcactatcatgctgaaaccagaaatgattgaaaaacttaatgagcagatgaacctggaactgtactcttcactgctttatcagcaaatgagcgcctggtgcagctatcataccttcgaaggtgctgccgcgttcctgcgccgccacgcccaggaagagatgacacatatgcagcgtctgtttgattacctgactgataccggaaacttaccacgtattaataccgttgaatctccgtttgctgaatattcttcacttgatgaattattccaggaaacctataaacacgaacaattaatcacgcagaaaattaacgaactggctcatgctgcaatgaccaatcaggactacccaacatttaatttcctgcaatggtatgtttctgagcagcatgaagaagagaaactgttcaaatcgattattgataaattaagcctggcaggcaaaagcggcgaaggtctgtattttatcgacaaagaactctctaccctcgacacacaaaactaatgctctcaggcggcaggttttctgccgccgtttcaaatcagtgacggcaaatcttactctgatcggtcgaaaaaccttcttctgaaggtataaatttgccttttgctgccagaaacgctaccagctctcccgcagtcatcccttctgccgagcaggtgtgaaaacgtgcctgttcaccaaaacgcgctttaattgctgcttccagactggcatgcgtatattgctcgcctgattcaatcatcatatttaacacttcatgaccgtgaatagagtccatcgttcctcctcaaaaaaagcctagcgtagcgattgccgcttatgaagactttgcgccagcgcagaactaaacgcttttattgtacatttatatttacactatatgtaacgtcggtttgacgaagcagccgttatgccttaacctgcgccgcagatatcactcataaagatcgtcaggacagaagaaagcgtgaaaaacagaactctgggaagtgtttttatcgtggcgggaaccacaattggcgcaggcatgctggcaatgccgctggctgcggccggtgttggttttagcgttacgttaatcttgttgattgggctttgggcgttgatgtgctacacggcgctattactgctggaggtgtaccagcatgttccggcagataccggtcttggcacgctggcaaaacgctatctgggacgctacggtcagtggctgacgggcttcagtatgatgttcttaatgtatgctctgactgcggcatacatcagcggtgccggtgaattgttggcctccagcatcagcgactggacaggtatttcaatgtcggcaaccgctggcgtgctgttgttcacttttgttgccggtggcgtggtttgtgtcgggacatcgctggtcgatttatttaaccgttttctgttcagcgccaaaattatttttctggtggtgatgctggtattgctactaccgcatattcacaaagtgaatcttttaaccctgccgttgcaacaggggctggctctgtcagcaatcccggtgatttttacctcatttggttttcacggtagcgtgccgagtattgtcagctatatggatggcaacgttcgtaagctacgctgggtgtttataaccggtagtgcgatccccctggtggcatatattttctggcaggtggcaacgcttggcagcattgattcaacaacctttatgggattgctggctaatcatgctggattaaacgggctgttacaggcgttacgcgaaatggtggcctctccgcatgttgagctggcagtgcatttatttgctgatttagccctcgccacgtcatttctcggcgttgcgttaggcttatttgattatctggctgatttatttcagcgttcaaataccgttggtggacggttgcaaactggtgcaattacctttctgccgccgttggcgtttgcactgttttatccacgaggatttgtgatggcgctgggttacgccggtgtggcgctggcggtactggcattgattatcccttcgctgttgacctggcaaagcagaaagcacaatcctcaggcgggttaccgggtgaaaggtggtcgtccggcgctggtggtggtgtttctctgtggtattgctgtgattggcgtgcaatttttgattgcggcagggttgttaccagaagtggggtgatcagatagcctcaaattccttattgggtgccagaattaacgctgacacccaatttgacctcttaatgcaggcagcactgcttaaatttcttaccactaccgcacgggcaaggatcgttacgccccggtttctcttctgctttgatcggttgctgaacagctttttcctgcggatgcgccatccagtacgcatgtagatcaagcgccgccagtcgaatggcatctacgctctcttcaaacgcttctggcgacattttctctacccgctcgaagttttcctcagtaccgtgcagcgcaatcgcctccagcgctggttttaacgaatcgggcaacgttgagcagtcagaaagtgccacgccccgcatatagccaaagcaccactcctcaacaatcgtcagctcgctgccatcaacttctcgcaagccgaataacggctcaaactgctccgggaattcgttcagacgctctgcggtatcggccatatgttgaaaagccagattcataaagcgcgtcatctctttctctgacgcccagcgcggcacatagtcagccccaccccacacggcaaccagccactgtgccggttcaatctcttgcggagaactcaacaccgccgtcaataaaccgtccagctccgccacatcaaggatggcgtggtcagtgttgtatttggtcagaatatcgtccagccattccaactcactttcgtttaacggtcccgttttcatacgcttttccttgtggatctcaactcgccagcacctatcttacatgccggtccgtatcagagatactttttgagtggctttgccggtgattaaaaattaaggagggtgtaacgacaagttgcaggcacaaaaaaaccacccgaaggtggtttcacgacactgcttattgctttgattttattcttatctttcccatggtacccggagcgggacttgaacccgcacagcgcgaacgccgagggattttaaaaactatcaaccaccatttataaatcataaccttatgattttattaactttgaaaatggctctatacaacgccatttgaatctattgtcactttttatcgccactttttaccctctattgtcaaaagggttcaattcaacagcagcctctaaatgacctggagcaaaatgcgcataacgcatagtcatttttatatcgctatgccccagtattttttgcaacacaagaatatttccgccccgcatcataaaatgactggcaaacgtgtgacgtagcacatgagttaattgcccatcaggaagctcgatcttcgctctcttaattgcagcgtcaaaagcctcataacatggtgaaaatagcgctcctcgttttttaggaagtatagcctgcaattgaggtgaaatcggtacagtgcggttcttctttcctttagttttaacaaatgtgattcgaccgggcagtacttgagattgctttaatccttctgcttcactccaccgagcacccgtcgcaagcccaatacggacaacaacccccaaatctttattccgtgactcatcacacgcaatcagaaggcgttcaatctcatctacatacagaaacgccagttccttttcttcctcacgaaacttgcgaataccagtcagggggttttcaccagaccactccccaaggcgcttcagttcggcaaaaacagcatgtagatatgactgctcgcgattaacggttgcttcactaagttttttcttccccttgggattccattctcctgatagccttctttcccgataagtagcaaacatatttttgtcaaactgagaagcaaatggatctcccagcctggaacaaatcgcctcaagtttgactttgcgctctgcaccagaggacaaggttttaccgtacatctcaaaccaacgagcaatcaactcagaaagacgaggaccagaaccatcttgaaactcgtctccaactctactattcattatacggcgctcataagagagcgcctcactttttgtcgcaaactgtttacgaatgcgttttcccgatgccccgtagggataacattcgcaaagccatttacctgatgtaatcttacgaaccgacattttagttacttatcacataaatcaaatgcagccttagtgacatcccccagagtcttttttaaccctggggcggcatcattatctagccaaaatggattattgttatctaacggtaacgcaccaaatgttttaccttttattcgagccaaacctgtaagtgcatataacttattatcgtcaaaattcatcacataaggattaccatcaagacactgtaattgaacctcatcagtattaaatggccataccccattgaaactctcacgttcaatagttttaaaaggcattgcgacggcggaaaaagaaaacatagataaaaaagtaactaatagttgaaccttttttactttcatatcattacctcaatttagctcaagtaagattacaaattaaaaaacgccctagaaatgacaccgcctaccaaaacccctacgcagataaagaatattatttcttttggataaagtcggattaattctgaagcacgaagtcggacttctggtaaggtcgaactctctgtgtggcttgatgccgattgttgctctaaccacgacaatgcagactgtaactgagaacgagtaagatcgtttaaacgtcctgtaccgaaattgatatggcaataccgcagaagtttttgtcgaagtccacagtcttcactgttacgtagtaataaacttacaagagccttacaggcatcatgatctttacatcgctcaagcattgcatgcagaaaactctccgctgttttatattgatttactgtcatatcatcaataccagctacaccaatctccgcatgtactttttgccaaataataaacgcttcagtattgctagcttctgcaatagcagcaaccaagctatttagctccttacgctgagccttaagcaaagggcgatcgtcatcatcattattcgaagggattgcgatattgacggtctgagaaccatcatatcgctctatctgaatattcttttcgtgaaaatcacgcccagcaacgcgattgtttgaaccgtttgagttgacggccatgtcacctccctactatcacctacccttagtttcgttatagtcacgaccagcgatacggttattaccaccagaaatatttaactcacgtcctgatggctgagtttccttttcactgatcgcaccttttaaagccccaatcaccgcatttttcacatctaacgaagctgctcgaaagcgagtaatcaactcctgctcatcatcgttataagtttcaggtgagtgaattcccaacacaacatactgaacatcaaggccaaaacgagacagcgctgccaaatacgcagcatcaggaaagctatctcctttctcatatctaagctgagttagctttttgactccaccaatgtcgctcatggcaacttgactaagtcccaatctttccctttcctcacgcaaccgctgaccaatatcatttttcatacaaaaaccttgacaggtatcttttttgataccaaaatgatttcacgagctattagatgatcacaatataccactatgaaacaagttcttcacgataccagatcacgcattccgcgtaacaccgccacaggtccaagactggcacttcggctgtccctcgaggagcgagccgtcattgatgaaatggcagctaaagaacaacgctcatcctctaacatggcgcgtatgatcttccttcgcggcctagagctaacccagaaagaacaaaacaaatcttcctgatcaggaggctagtgggatgtcaggtataaccatcaatatcaatgtgaatgccccctatgtatccctgcagaaatatgcagagataacaggtatccctcttaatacatgcaaaaagatgttggctgacggtcgaattattatccgacccaaacgcgccaaaatggaaaagcctgaagtaaaccttgtggcgatgttaaaagacgctttggctaacagctaaaacaatgaacagagcaccatcatgaaaaaaaacgctaataatccatactccaaatttcgtaatggcgtagaacgccatgtacaccacgtcgctaccagtgcatcacgtagtaacagtcgctataacctgaacgagacgcacgcaacaccggatggccacgctgtaaaacaaatcggcgagcatgcctggctgattgagaaagctggaatcgtggtccacaaatgcccacgcaatccgtttaccggaaaccgcatttttgcattgaactgcggcgacaatcacttcgggcaggatttcacattatacgaagcacttcgcacggttgatcgtctgcttcgcgggcaaagttttattaaacaggctgatttataacaggtgctttatgaccaaagagcatgcacaaggtgtatttatccgttttattgattttcgcggtgaactgttattacgcgcatcagccattgacgtagttgttccatccgaaaaaaacgcagctacttacgtttatctgaacggtacgcgcctgactgtggagcttccgtaccagaccgtacgagaaatcattagcgaagctgaaaaggcacgtcaggttaatggcgatgaaccctatatcgaaattatttgtatggattcagaagctgaaattcagaaagcagattaaagggcgttgtgatgggcaaagaatataaaactctcattaacaaagcacttgagcgtttttattttcgcttaagtgcatcaggcgctcatgctgaacgtgcggcccgtgactcattgaccagagcaatccgaagtctgtatgacgtggctttttacgctgatgatctggatgcacttaacgaactttccgagctgatctatgccgcagaatgcggggaacatattgaaccgtataagctgggaaatatcgcatgagtatatttatctcatggcttgttctgattatttcggtggtctgcgccattgggattatgcgaattattaattcagtaaaaaagattgaacgccttttcactgaagaataaccgcgcaaataagaccccaggttaaataagaaaatgtgaaaacaatccgcattcgcggaggtattcgcacacgccaaggaggcgtaatggcaattaagcattttcccgtcgttcgtttcacctccaaaggacgtgaatacgaagttgacgaacgcctgattaccacaatcgacaaacaccgttcagaaaaggatgcatatcacatctatctcactgacggcacttacttttgcgccaccaacgtggtgcaggtaaatcttatcagacaggtacaggagtcacgcagatgaccattctggactacatcgctgccaatccgggttgtagcggtggagaaatcgccgcagcactgaatacaccaaccacaaccattaatgcggagctacgccgtctctggcgcagcggttcagtcataagaaaagagcgcaaaacaggcggtcgcttttcttatcaggtaaacccgatgccgtttgggtgtagcaacccactaacccagatgttcaaccagctactgagggaaatcagagcatgagcacctccaactgccggaaaccacgtcgggcttcagcagctcatccggcagcaaaacaaactccattaattcctgttccgggtctttcctgcaccttgtggcgggaggccttcgcacatctgtaacaagaggattgccgcaatgattctcgccaacgactttcttgaatacctgctcaacacagagcgtgatcttgccgttcgcgtgcgtgaacgttatgacatgtacctgaaatccctgcctgtaccgcagctcgctgacggaaagattgttattgatggtcgctacatgattgacagccacgagggaaattacaggctttaccgcattgaaggtggcaccccgtccgttattggcatttaccagcgcccatcctctgcaatcgtcaatgtgattgccgacagcatccgcatcacacatcgccatgccgacacagaagacaccgtgctggaaattcagcggctggctacagtctgccgcgacaccctgaatggcatgacgaagtaaatcactatgacggcagagtacatcagggactggcaacaaccgcgccacgcagtggggcgtgaaggaacggggatccccgctcctgaatccgcgctttcctcctggctggatgcctaccgggcagagaacgagcgccgccaggaaatggctgatgcggcgttctccgccacgccgctgggcaacctgattaataaaagcctggacgcacaggaaaaacaggacaaaacaatcacactggcaggagacgccagaaaacaggcacgcggcgcggtagatgaggccatggcctcactgcgcctgctgccgtcctatctgcgcgatccgcttattcgccacctctccttcctgcgcaaaaaacaggaagccgatcgtcagaaaggaaaaaacgccaggcaggcagaacgctatgcgcgtgggaccctgcgcaaaatattcgaacgtctggagcgcaccgatcaccgctggctgacatcgggttatcgctcccttgccggacgtgaacgcctggacgatttgctttacctgccgcaactcaacaaacaccagatacagacgctggccaccatgacggcggcgatgttcagcagcaccttcgaaaaactctgcgatggttttggcgcgactgatggcgagctgaccatggatgtaacgctgaaggcgtatcagatgctggcccgcatggcgttacacttacacgccatgcctccgcattatgacgcactgacaacagacaaagaccggaggcacgaaccggacacagaactgctgccgggcgcaatccttcgcctgacctgtgcggaatggtggaaacgcaaactgtggctgttacgttgcgagtggagagaagaacaactccgcgccgcctgtctggtttccagaaaaacatcgccctatctgagccaggacgcgttaagcgagtttcgcgcacagcgcgagaaaacacgcgatttcctgaaaagtttcatgctggaaaatgaagacgggttcacgattgatctcgagacggtgtattacgcgggagtaagtaacccggttcaccgtaaggcagaaatgatggccaccatgaaggggctggaacttctggccgaagcccgtggcgacaaagcggtgtttctgactgtcacctgcccgtcaaaataccacgccacaacggagaacggtcatccgaatcccaaatggaacggggccacaatgcgcgactccagcgattacctggttaacacgttttttgcggcggtccgcaaaaaactgaaccgcgacgacctgcgctggtatggcatccgcacggtggagcctcatcatgacggcaccgtgcactggcatatgatggtctttgcacatccggaagaaatcgacaccattgtgtcccatacccgcgatattgccattcaggaagaccgccacgagctgggcaatgatattactccgcgctttaaggtggagtatgtcgacggctcaaaaggcacgccaaccagctacatcgccacctacatcggaaagaacctggacagccgcgccgtggatggcatcgacccgaaaacggacaagccacgcgtggaccacgaaaccggaaaatcaatggccgagagcgtggaacgcgccatcggctgggcgcgtcttcaccgcgtccgccagttccagttctttggtatcccctcccgtcaggtatggcgtgaactccgccgccttgccagtcagatggcccgcaacccggaaggtccacaacgtctggaaaatgacgcaatggatgcggtactcgctgccgctgatgccgggtgttttgccacctacattgagaaacagggtggcgtacttgttccacgcaaagactacctgattcgcaccgcctacgacctcgcagaagagctgaacgattacggcgagcaaagcgtacagatttacgggatctggtcgccacaaatcggggaatcttcccgcgtgtgcacacacccggataactggaagctggtaagacgtaaaccggaagcggaagacagcgcccgcgaaaatggttttgaccttcagggcggccctgccgccccttggactcgtggcaataactgtccccgtgtacaggaaacggacaacaacgggacagaacagccggaagaacggccagcaccgtggccgcagctccctgacggcgttgaagtgaacgaatggatgcgctcactgaaacggcacgaacgccgggcgctgatgcgttcgcttcgtgacaaacaggcaaaaaacagcagtgatgaagcgcagagctggacacagagccgcaaacagcagcggcctttgcctgataaccacgaattactcgctaaagaatggcgggagtctgctgaatctctcggcctgcatatcggtgaacaacagatgcagcacctgttacggggcggcagtctgtacgttgacggcagcatcattgcaccgcagggatttgaaattgtacgcaaaccggatacccgcctggacagccgaatcacgcagctctggcagcgcctgagccgtaatcatggcgtaagcagcacggagatccgccataacccggtcgccagctatctggcacagctgggggcatcagaccctgaagccgccgcacgcctggcatccacacttcagcaggaccagaacaccatgaaaacacccgttaccgtgctttctgacatgctgcgcgccatccgcgacgcagagcacgcacagagaatcagtgaaaccactgaacgcgccagccgcaaagcagacctgctgcggggtggcctaaccagtggaaacaaaaaacagacagaaacgggactcacaaatcccgtaaatgagcaaaaaacgcgccgcgatatatgaagcgcgcacaaaacaggcaaaagcgggatttcagaatcctgtaaccgattaattaatcaacataaggaaaagcgacatgaaaatttgtatcgacgacggctccaccaacatcaagctggcatggaccgagagcggcgaacgccgcaacgccatcagcccgaacagcttcaagtcggaatggtctgcgccgttcggtggcacacagcccgcgaactacatgcttgatggcgtgcgctatggttttgatccggtcagcgatcgctttgtccagacgaccgacacgcaataccagtacagcgatgtgaacgtaattgccattcatcacgcgctagtcaaatcaggcatcacgccacaggaggtggatgtggttgtcaccctgccactgagcgaatatttcgacacaaacgcacagccggacatggccaacatcaaccgcaaaaaagcgaacgtcatgcgcccggtggagtgccagaacggtgaggcattcactatccgtaacgtgcgggttatgcctgaatccattccggctggctttaaagcactggctgacatgagtccgtttgaatccctgctgattgtggatttgggcggaaccacgctggatgtggcaaaggttcagggacaactggcaggtatcagccaggtattttgcgatccacacgtaggcgtttccctgatggccgatgccgtactgtcggtgatggccactaacggtatgcgtaccagtcaccacatcgccaataccattatcgaacatcgccatgatgaagcctggctgcgccagcacatccacaatgacgcgcattacgccagcctgatggcggttattcgtgaaaaggaagaaacactgaaacaacgcgtgatccgcgcgctggcgggtttttcgggttacgggcgggtgatggttgtcggtggcggggcggagattgtggcacccgctatccgcgaagcctgcggagttaatgcgactttcatcgcggacggggtgccacagtttgctctggttaatgggctgtacgcaatggacaaggagtaaaccaatgacgacaccaaccagacggataagtttctatctgaagccagtcgccgtcaatagtgaacgggaggcgtgtaattacctcgacagcctgccagcctctgaacgcagccgcgcgcaacgcgcggcctttctggccgggctggcactcataaaacgcgatcctgcatttgcctattggttggccgaatggccggaagaaggagctgcgccagccaagaataatattcagagtaaatatgccagcacccctgccaccggaagcaatcacagcactagcgagataagaaagaacattcagtcatttttcccagagtgaaaacaggagaggagcatctatggcaactatccccaaaaaatggttacaacgcaaaattgcagaccttgaatcgtgtcgtgaagacatcccgtttggccttgatgaaaacgatcacaatatgttaatcgcactgaaaatcgcactcacatcgctggaagcgaaacctgttgcatggactgatgatgaggaactgcgtgatgtcaagcagtatggtttaggtgagatatatcagtgtccgccagataaatacgcggacctgcgacgtgttatccctatgtatcgagagccgccagcgccagcagtaccagatggactggttagagcggtgcgtttctatgaacaggtaaagcgtgagaatccgccagtcgaaactggagtatggaaagacgctattgactgggtgaccaaagaggcttgccaagctgtagacattggcatcaaaggagagtgatatggcaactttgacaaaaaaagaacaagcatggttgagcgaattacaggacgttcttgatcgctgtccatcaccgaaaaaaattggtttttacaccattggcgataaaagcatttacctgtatgacctacgccgcatggatgaaatcatggaggctcttgataatcgttcgtcaatggattggtgtgttgctgtccatgatatgaatgcagggtttgatgaaaagattttgttcccctcatcagttgaaagcacagcaggataaggacccagcaaatatacacaacctataaaacactaaagcgcctcaggggcgctttttgtttgcacaaaagtgcacaaatttgcacaatttttttgaacgactttttacccttccggcccgtatggcggctggatccgtcaaggatccgtgcgtgcacaaaaaaacgcgctttttctgcgcgcaggtgacgggggaacagcccgcgtttcagggggtaaatagcatcccctgaacgatgtcgcagcgacacaacagaatggctgtatttctcacgctgagcgtgaaaaagacgtgagggcttttgatttgatgaggtgaaaggtaaggccgtcaaaatcgcactgagacggcgagaacatgcaatcaacgcggtgggattgcgtaagagtctgactgtcgatgatggcaataagcaggaaagcgtcgtgaaattatctgattgatacaggagctggagagtcggggcataaattttttatgccccagcgaagcagcagacaagcgaagcgcgtcaggatgtgggttgggtgtctaacagtgcgtaagggttaaagcggatcacctcttcgccaagccagtcattgatgtgcttcatggcctccatgacgggcatcagctcgttaattgcgtaaacccgcgcggccttctccacatcaccaaacgcacttttttcgcccggcatcgcccccatcagttgcggcggaacgcggtgcgcagccagcacatcatcacgggatgccgccttaacattcatgaactcatcctttgcggtgatctgctggaacggcaaaatttgcaccccctctttgcccccgttgggcgcatggatgagcacgtttttaaacgcgccaccaccacgcgcaccctgtaacgtttctttcagggagtccatgctttcgcggtttacctgcgctgcaccgatgtagatgatgcacccggcgtgggatccattgtcgtaatacagttttctgaacatgtccgccgaatgagacaggctggccgagagtaatgcgccaagatattccggcatgccgtaaatttcctggttaatgtccggattcatcaggtggcacactttgccagggcgaaactgaaacgcatccttgccatcctgcacataccaccatgattcaagatcgcttccgcgtcgcatgtatttcgccagggcgtgccgtaatttaagcggttcgccgaacatattgcttcgaagctcaaggaatgcgttaccgaacacaaaccagtccagcgccagcgccgagaaatcctgccgggaaagcagcgggtgcgggatgtagcacccgagcaatacgttgcgcttaaagtaaagcgcagactgatgccaggacgtttgccgggcggctcttgccagaccgtaccagtccaccggggtttcataccaccgcccgttatcagcacagtacatattgtccagcaaatcatgcccggtcaggcgataaggaccatcaaaagtgaatgcactgagcgacgattctttcctgagcgcatcagcgagatcaatgcgtgaactcatgcgcacttttttattttttctgctcatcagaactccataactgtgaaacgctcgttttctccttcgccgccaattggttcgttaatgacagcaagcatggttgcccacgcaaggtcgccgtggctgctccccctcgcgcggtccgtttcgtaagtgataaagccgcccggtgttttcaccttacgcacggcgttaaaggccgcgaccagctcgcgttcggcgcgatcgtattcccaccgcccggcacgcattatttgcagcattttcagtacaagcgaccgttttgatgacagcgtgaaggtgtacggaatagcggcagggaaaaaccgtttcactatctgataaacagcctccccgttcccgcccgtcacatcaatgccgatgtgttccacgttgtagcgatacgtgaaatcttcaatgactctggcctgttcttcaaactccagcccctgaacgcgtcgcgtctccaccgttcgaaaacggcccccaggaacagccggaggaaccaccacggacacagcgccgctgtcgccgttgccactgctgccgtttgcgtcatacccaatccataccggacgattccccatcgggcggggagcaaaaggtttccagtctttccagtcgtcgtatccgtcaacaccgcagccaatcaggatattcaggttaaatgccgattccccttcgcggacaaactcacacatatagagattgaggaactcgtcttcggtgttttcatcacgaatttcgtcgatatcggtgtgtttccagccgtgattaaccacatcttccagcgtgacaatttgccgccacgtccggtcagggcagataagcccgttatgcagcgttttccagtccacagaaaaacgctggcgtttatgcgtggcctttttctcgttccagcggtcgccgttccagtaggcgtatgcttcgtgcgtttcggtggatggcgtggagaagtaggtgcgccgcaatccgctgagggttgccatagcgccagccaccttgcgcagttcagcaaagcgactgacccagaaaaattcatcaaaataaaaattgcccgtataggactgcgccgacgcagcagaagtgccgagaaaatgcagctctgcgccgttggagaggatgattttatcgccccctttcagctccacatcaacttcagccgcggccttctgaataatgcttttaaactggaacgcctgacgacgcgacgcagacaaaaaaatctggttacgctggtaaggttgcgccacatcgtcacgcagcgccatcagcagtgcttcctgtgcaaaataccaggtcgcgccaatctgtcgggatttcaggatcatcctgttacgtatcccggcttccctgcaaagggtcagggagtcaaaccagccccgctgatgccactccagcctgctgatgatttttcccgcagtgcggcaatctgttccggcgtgaaatgatttttgagttttttcgcccgacctttctttcctgtggccgtcgcatccggctggccatcatgcatttttttaagctgccgggtcagcaggtctatttccttaaagtcaccgcctgttttattctgtttttcagtaagctggatgaggcgcgcatcgatggactgcgtgacacgctgcacgggtggcgtttcatcccactggtcgcgttttttccacgcataaatcgtgttcgggtttattcccatcagacgtgatatttctgcgggcggataaccctgccagtaaagttgccgcgcacgctggcgcacaaaagcgtcctgaatcattgctccccctgagtaattacaggaagattacccgcgcgcgaaaccgttctccttaaccccctgttctggccgttttcttacaacaaaagccctttgtatcagcctgttacgctttgccatcatgactgaagaaccagtcagaggggcaaaaactatggctaatgaaaaaaagacatcccgcaaaaagtttcgcgtggctgtctccggatcaactgttgatggccgcgaaatcagccaggtacatctgcgtgaagccgccgagaacttcaacccggatgtttacgctgcccgcgtgaacgttgagcactatctctcgccatgcccgtcaagcgaattttccgcaatgggcgatgtcaccgcgctgagtacggaagatattacggaaggcccgctggccggacgtactgcgctgtatgcagaaatcgaaccgaccgagcgcatgaagcagcttgtcgctgacggcaagaaaatctattccagtatcgaactgcacccgcagttctccgttaacgggcgcgcctatctggtcgggctggcgatgaccgacaccccggcaagcctgggcactgagcgcctgaaattcacggcacagcaacgtcaggcggtgatgacgttcaacagtatccagggtgaagcaccgcttatctccgaagccatcgagtctgaaatcatcgaaatggcagaacaacgccaggaagaaggcacccagtggtttaaccgcgtaatggggattattggtcgtggccgcaaagcggatgacgccagtttctcccgaattcaggaagcggtggaaggcgttgcaacgtcacaggccgacattatcgaccgttttaatgtgctggaaacccgccatcagcaggaccgccagaaaatcacgtcactgaccacagagctgacagcattgaaggaaaaactgcgcacgcaggacggcgatccgcagaaccgcttcaccgcaacaggcgcagcctccgaccagctggctgacttctgataagacaaaggagcaaattttttatgaatctggtgatgtcagatattacccgcaacaagctgggttgctatatggcgcagcaggcgtcgcttaacaatatcccggtatctgcactggtatcgcgatttaccgtggaacccgcggtgcagcagcgttttgaaaacgcctcaaaggaaagtaccgaatttacgaaaagaattaacgtgatcggcgtgaccgaccagaaaggcgaaaaaatcctcccggacaccaccgggccaattgcgcgcacgaatagcagttatgacggcatcaaacgccgtaacccgaataacgtgatcgatatgaagtctcgtcagtaccagtgcgaacaggtgaactacgatacctttatttcgtacccacagcttgatacctgggcggcccacagcgattttcagtcccgtatcagtacacagatcgcccggcaggtagcgcttgatcgcatcatgattggctttaacggcacatcccacgcctacgagtctgattttcacaccaacaagctgcttcaggacgttaacgtgggctggctggagcacatcagaaccgatgccagcgagcgcgtaatgaatgacgtgacgctgacctcccgcaacatggacaacactgtggcgcacgtgggtaagtatgcgaatgccgatgctctggtacaggatgcgcgctcatccctgctggatgaatggcacaaggaagctgacgacctcgcggtgattatggggcgcaacctgtttaactcgctgcgtctgcccgtgctgaacagcatcagcggccagaatcccaatgcggaattacttgccgggcagctcatcctgtcatcgcgcaccattggcgggctgggcgtgttccttgcgccgttcttcccggatgcaacgatgcttatcacctcgttcaacaacctgtcgatttactggcagaaaggttcaatgcgtcgcctgatgaaagacgagccggaatacaaccgcatcgccacctaccagtccatcaatgacgcttatgtcgttgaagactatggcaagtgcgcgatgatcactggcctgaagttcgccgacagctaatcaactcacggcgggcatcatgcccgcctgtaacggagagaaaaaatgattactcctgcacaacaacactggcagaacgtgatggcacagcgcgcaggccgggcgaatgaaggtgtggaccacgccgcgcgtaccgcgcatgaagaggtgctgtatcgtctgcgtctggcacaggccaggctaaagggcgtacaggccagaagcgcgaaagccgccatcaaaaaagagttgttgccggacttttccggctggattgagggaacgctggagactgacggcgggcaacaggacgaagtaattgccacgctgatggtgtgggcgattgactgcggcgatcttccgctggcgctgcgtattggtgcatatgtggtccgtcacaacctcatcatgccggataactttggccgtactgctgccacggtactgaccgaagaaatctgcaacccggtactgacgcaggccgggacggatgccgacgcggatttatccgcctttatcgaaccactggacacactttgggaaattgtcgccaaccaggacatgccggacgaagtgcgcgccaaattatgcaaggcgtgtgcctttgcccgtcgtggcctgaccgatgcagacaacatggcctcatcactgaagctgctgcgcgaagcgatgcacctgaacccgaacgcaggtgtgaaacgcgagattgcaaccctttcccgcgccctgaaaaaagccgattccgcagccgcaccagaagacgccagcgcacagcagacgcaggacgaaagcagcaaaagtaaaaagacaacgcagaagcctgcaacacgaaaaaccaccgcgtcgcagaaggcgaagcgcggttaacgactgaccccgtcagcgggcggcgtgcgcggtgttccggtttgactccgtgaccgtttacaccgcgcacccaccgcccgattttttttcaggagtgaactccatgagtatggttgccagaactgaaccaggacccgcagaggacgacatcaccgataccgatgatggcgacactcgcatttcagcaggtgcattctggccggatattgtgctgcgcgagctgcgtctggcggtacgactgccgggccgcgtgaccacctcccgcctgctgcataccgccactggggccgtggctcacgttacccgcgaactggaagcgtggcagcaggaacagcaggcggctggccatcagacgctggccgatgttccggcacccgtaattaacggagaaagcgtcaatctctggcactggcgcaatgctgtttataccgccacacgtgccctgattctggagcgttaccgcgatgcggacacaacggacaagggcgatcgccgggcggacgcactggatatacagacatcggatttgtggcgcgatgtgagctgggccatctctgacattctgtgccgcccgcgaatctttgcggagttgtgctgatgaaagtgaaggcactggaagacgacaccgtggattcgctctgtttccggtactacggcacgacgcagggcgtcaccgaaaaggtgctggatgccaaccccggactctgtcagcaggtatttctggacgccgggcaggaagtggagatgccggagccggagaagaagaaacgagaaatgattcagttgtggggggagtagcagtgagcaccattcaaacagggatcacagagcaggttattgcgtggctctttgaccacctgccaacggtgtatgcagtaggcgcggcggtcagcatttccgcgctgatgagtctttatgacggacgaacactggttcagaccgtaacgggatcgctggcgtgcggcgttcttgccatggccgtggccgggtcgttgcgcttcttcgggtttcctgaagatgccgtaacgtttatcggcgcatcaatcggttttatgggggcagagaaagtacgcgacaaggttattgcggcctttaatcgcagggtgaaggagaaggacgaatgagcaacacatttaaattcagcagccggagcgaaaagaatttgcagggcgtaaatcctgatctggtgaaagtgacccgacgggcactggaaatttcggaagtggattttggtatcaccgaaggattgcgcagccgttaccgccagaagcaacttgtggccacgggtaagagccataccataaacagccgccaccttacggggcatgccgtggatgttgtggcttatgtcggcagccaggtgtcatgggaatggccgctgtacgaaaaaatcgcagcagcattcagacaggccagccaggaactgaatattccggtggaatggggcggcgactggaagaccctgaaagacggaccgcattttcagttaccacacggagcctatccggcatgaagctctggcccacgcttggcgtcgctttccttctgattgccgcatggggaacatccatgcgtctgtcgtggtcgctgggccgggagaacgccagaaacgaagcgcagaccagcaccctgaaaagtaccgtcgacacactgaatatcatcagcgccggggtacaggatatgcagcaggtgctggctcaactccgcgcggaaaatcagcaacgcaatcaggacggagaggtaagacgtgaacagctacgcaacgatattgcaaaagatgaatgcgcccacgctttgcctgacgctcgttttactgacaggttgcgcaggcacgcagaacgcgccacggccagcgccgtcagtccggcttataccgcagacgctgaccatgccggtaacgcctccccccttccctgacccacccacatggggaaacctcggaatatggggcgaccgccttctggatgcactggaaacctgtaacgcggataaacgggccattgctgaactggataagagaatagccgaactgacacaccagacgggagtaacacaatgaccagtaagaactttgcactgattacagccatgacacaggctgaactgacccggaaagtgaatgaatatcttgcgaaggggtggcatcttcagggggacacacgggtagcttacgagcccggcaccccgtggtatctcatgcaggccatggtggccgatggtgccaccgagacgccctctgagccattaccaaacaacaagacgccggaatggtactacgtggttgtgcttgccgggcagtccaacggcatggcttacggtgaagggcttccgttaccggattcttacgatgctccggatccgcgcattaaacagctggcgcgccgcagtacggtaaccccgggtggagagggttgtacgtataacgacatcatcccggctgaccactgtctgcatgatgtgcaggatatgagtacgctgaatcatccgaaggcggacctgagcaaaggtcagtacggctgtgtgggacagggacttcatattgccaaaaaactactcccgtatatcccgaataacgcggggatcctgctggtaccatgctgtcgtggtggttcggcattcactcagggcgcggagggaacattcagtacgaccacgggggccagccaggattcggcgcgctggggtgcgggtaagccgttatatcaggacctgatcgcacgcaccaaagcggcattacagaagaacccgaaaaatgtgttgctggcggtgtgctggatgcagggcgaatttgacatgagcgctgccacctacgcacagcatccggacctgttcacggccatgctgaagcagttccgtactgacctttccggatttaacgcgcagtgccatggcggcagtgctgcagttttaccgtggatttgtggcgacacgacgtattactggaaaaacacatacggcacacagtatgactccgtctacggcgcgtacaaaaacagggagagcgacaacgttttctttgtgccgttcatgaccgacggtaacggcaacaacacgcccaccaacttaccggcagaagacccggatattgctgatgcaggttattacggcgcgcaatcccgtagtaatggtaattgggtatcgtcaaatcgtccgacacatttcagttcatgggcgcgcaggggcattatttcggatcgcctggcaaccgctattctgaacgcagttggtcgaaccagcgccttcatcagcggtaccgcaccggaaatcaaaccctcgcccggcggcgacactccatcggggccgtctgatggtgacacatccgttcgtacagtctccctgctgccgacagccggagaggctgctgcgcagggctggaccatcaccggcggcagtgttgcgctggaagatggtgtgtttaaggttaccaagcagagcaataaaacttggtccctgatgcatccggtggatgacgcagtctccctgctgacacggggtggcagactgagctgtaagtttcgactgtcaggcgcactgaccaacaaccagttcggtctgggaatttatctgtataccgatgtagcgttacctgacgtcgtggcgatgaccgggactggtaacccgttcctgatgtcgttcttcacccagaccacagacggcaaactgaatctgatgcatcacaagaaagccggaaacacaaagttgggcgagttcgggaattacagtaacgactggcagacgctggagctggtgttcaccgccggcagtgccacggttactccgaaactgaatggagtggctggcccggcattccaggtcataaaagacagtctgacactggggctgaatgcgctgacgttaactgatatcactaaaaatgccgcgtacggcgtcgatatcggcagcctggtgctggaaatcaataatcccgcagtataaggaagagcaggagagcaaaacagatgcttaagacaaacagtctgcgagagtccatgcttcatggatgtcggtggtgccaggctaatcccgagaaattcaccattttcgtggagagcggcaacattgaaacgaccggagaaacgccctcgtttgtttaccgctatcagatggtgatgtttgtcatggattacgccggagagctggacgacctcacgctgccgctgctggcgtggttatccgaaaatcagccacagttgttgctcaatccggagcgtaatcaggacatcaaattttccgccgttatcaatgacgatgacagcgccgatctcctgtttacgctccccctgcgggaacgcgttcgcattacgcgcaacagtcaggggacaccgcaggcagaacacctgcaggagccaaaaccccgtctgccctcttccgaaggcgactggtcgcatgtattccaggatgtgacgtggggtgaaagcgatggataaggcattcacccgcgtggatgaaacctttgaggccatccgcgacagcctgaatcagcaggccatcaataacatcgccagaaagctggcacaggatttacgccgcgcccagcaggcgcgtatccggtcacagaaagcgccggacgggaccgcatggacaccacgcagacgccgcgtaacccggatacaggaacgtattcgctttatctggaataacgaagcacgcacgctgaaaaactggcatcacgacacggggaaatacgggcgaaccattaccgggtgggatgaggataaaaacaatatccgcacgttttaccgggatgacatcgaccgttttctggaaatacgcacccggcgcatcaaccaggacagcacaaagcgcgtccccatgttcgtaaaactgcgcaccgcccgctacctgaaagccggtgcagatgcttccggtgtgacggtgggttacagcggcgtggccgcacgtattgcacgcgttcatcagttcggtgagcgcgatcaggtttcgccgggcattttcaccgattacccggtacgtgagctgttgggtatcagccaggcagatgaacgcctgatttataacaccgtgctgggccggattgcggaggctgtacggtgagcgcagaactcatgcgactgctgagcaacatcatccgcaccgggatcatctctgaagttgatgagaagtcctggctcgtgcgcgttcgcagcggcgaactggaaacaggctggctgcgctggaacaccacgcgcgcgggagccttcaatgtgtggctgccgccatcaccaggcgaacaggtggtaattgcctgcattggcggcaacccggaaaccgccatgataatcggcagcctgtggagtgatgccattccggcacccggcaaaagcctgaaagaaatcgtggtcagcgcgccggatggcgcggtgttccgctacgacgcggacgcaggcgcactgagcgccagcggcatgaaaacagccaccctgcaggcatccgtcagcgtgacactggacacgcccgtcgtggaatgcacagaccttctgagaactgcgatgcttgacgtcacaaaaggaggaaagatgagcggcaatatcacgcacagcggcggcaacttcacctcaaacggcattaccgtgcatacgcataaacacggtggcgtgaaaggtggcagcgattcgacaggaggcccgcagtgacaacccgctacacaggaatgaatccggacgggacgggaaacctgaacgatatggagcacctgaaacagtcagtcagggatatcctgaccaccccgctggcaagccgggttatgcgacgggaatatggcagccttgtgcctgatttgattgacgaacccatgaataacaccacgcgtctgcaatgcatgagtgctgccgtgattgcgctgacacgatgggaaccccgcattgccctggatgccatcgacgttgtctggaaagcgggaggccgcgccggggtgacgctgtcgggcactgtcatgcagaccatgcagaatgttgaattaaccatcacgctaagggagtaaatcatgcccgccgttgacctttcacagttaccggaccccgccatcatcgcggagcctgactttgaggcaattctggctgacacaaaggccatgataattgcggcttatcccgccgaacagcgtgaagccgtttccgccgcgctggagctggaatcggaaccccttaacgttatcgctcaaaccatgtcttttcgtgaaatgctgttacgccagcgggttaacgagggggcacgcgcctgcatgttaagccacagcgccgggacagacctggacaacctagcgggcaatatgaacacaaagcgcctggttatcactccggcaacggataccaccgacgcggtgatggagagcgacacctcgctgagactgccaaggcacagcgggcgtatgacggcctgagtgttgctggcccgtcaggtgcatacgagtattttgcacgcagcgccagcggtctggtgcgtgatgcgcgggccatcagcccgtctccggcctgtgtgacggtttccattctgtccactgaaggcgacggcacagcaacggaggcgttgcttaataccgttcgcgccgttctgaatgcagaggatacccgcccggtggccgaccgcctgacggtacagagcgccagcatcgtgacatggcggctgaatgcaaaactgtacttttatcccggcccggaatccgaacctattctggccgcggcggaatcgtcattcaggaagtggctggctgaacaggggcttatcggtcaggacgtggcgttgtccgccattgctgccgcactgcatgtgcacggtgtgcaacgcgtggagataaccgaacccacacagaatatggccatcagcgacatacaggcggcgcgctgtgagtcattcaccatcagcgaaggtgggcgcaatgagtaattcactgttaccaccatcagccagcaatttcatgcgttgtgccgaagccgtcggaacacgcattacagacattccggtagacctcaacacgctgtggtcgccggacacctgcccggtgcatctgctgccttatctcgcctgggcgttttccgttgaccgctgggatcgcaactggccggaagagacaaagcgacaggtgattcgtgatgcatggctgacacaccgacacaaagggaccatcagcgcactgcgaagagccgtggagcctctcggctacctgattgaagtaaaggagtggtggcaactcaacgaggagccaggaacatttcgcattgttgtcggagtacttgatcagggcatcaccgatgaaatgtatcaggaacttgagcgccttattgcggatgcaaaaccagtaagtcgccatctgacggggctggcgatcagcctgagtgtgaacggaaagattttcgttggtacgggatgctatcacggcgatgccctgacggtttatccctacaccccggagtctattattgtcgaaggggattatttccctgccccggccattcatttaattgataatctgagagtaaacgcatgacagcgaaatactacgccattctgactaatcagggcgcggaacgactggctaacgcgacgatgctcggcagtaagctgaatttgacgcaaatggccgttggtgatgcaaatggtgtgttaccaacaccaaaccctgcacaaacaaaactgattaaccagaaacgcattgcaccgctgaatcttctgaatgttgactctaacaatcagagccagattattgcggagcaaatcatccctgaagacgagggaggattctggatccgtgagattggtctttatgatgataaaggtgtactcattgcggtggcaaactgcccggaaacgtacaaaccgcagttgcaggaaggcagtggacgcacccagactatccgcatgattctggttgtcacgaacaccaaagccatcacgctgaaaatcgacccgtctgtggttctggcaacccgcaaatatgtggatgataaaatctcaaagcacgagcagtcacgacgtcacccggacgcctcgctgaccgcaaaaggctttgttcaactcagtagcgccactaacagcgattctgaaacgctggctgcaacgccgaaagcggttaaggccgcgtatgaccttgctaacgcaaaatataccgctcaggacgccacgacggcacgaaaaggcattgtccagctcagtagcgccaccaacagcgattcagaaacgctggcggcaacaccaaaggcggtaaaggcagcctatgaccttgctaacgggaaatataccgcacaggacgccacgacggcacaaaaaggaattgtccagctcagtagtgcaaccaacagcacatctgaaacgcttgctgcaacaccgaaagcagtgaaagcagctaatgacaatgcgaatggtcgggtaccttctgcccgtaaggtgaatggtaaggcgctttcggcggatataacactgacgccgaaagatattggtacgcttaactcaacaacaatgtcattcagcggtggtgctggttggttcaaattagcaacggtaaccatgccacaggcgagttctgttgtttcaattacgttgattggtggcgctggatttaacgtcggttcacctcaacaggcaggtatatctgaacttgttttgcgtgcaggtaatggtaatccgaaggggattactggtgctttatggcagcgcacatcgacagggtttacaaattttgcctgggtcaatacatctggtgatacttacgatatttacgttgcaatcggaaattatgcgactggtgtaaatattcaatgggattataccagtaatgccagcgtgacgattcatacgtcaccagcatattctgctaataagccggaagggttaacggacggtacagtttattcactctatacgccatcagagcagttttatccgcctggcgcaccaatcccgtggccatcggataccgttccgtctggttatgccctgatgcaggggcagacttttgacaaatctgcatacccaaaacttgcagcggcttatccgtcaggcgtgatccctgatatgcgtggctggacgattaagggcaaacccgccagtggccgggccgtattgtctcaggaacaggacggcattaaatcgcacacccacagcgccagcgcatccagtacggatttgggtacgaaaaccacatcgtcgtttgattacgggacgaaaacaacctcactatttgactatgggaccaaaactaccagtaacgacgggagtcacacgcattcaataccaacatcagatggtgcaaaccagggggggaaaattccactgacatctgggcgtctggcaactcaatatacatcagcaacaacaggttcctctggctcacattctcatactgtaggtattggttctcatcagcacactgtcggtattggtgcacacacgcactccgttgcgattggctcacatggacacaccatcaccgttaacgctgctggtaacgcggaaaacaccgtcaaaaacatcgcatttaactatattgtgaggcttgcataatggcattcagaatgagtgaacaatcacggaccataaaaatttataatctactgaccggaaccaatgagtttattggtgaaggtgatgcatacattccacctcatacaggtctgccagcaaacagtaccgatattgccccgccagatattccggctggcttcgtggccgttttcaacagtgatgaggcatcgtggcatctcgttgaagaccatcggggtaaaacggtttatgacgtggcatcaggggactcgttatttatttctgaactcggtccattaccggaaaatgttacctggttgtcgccgtatggagagtatcagaagtggaacggcacatcctgggggaaagatgcagaagcagaaaaactgtttcggataagggaggcggaagaaacaaaaaacagcctgatgcaggtagccagtgagcatattgcaccacttcaggatgctatagatttagatattgcgacggaggaagagacatcgttactggctgcatggaagacatatcgagtattgttgcatcgtgttgatacaacagtagcagcagatattgagtggccagtcgccccacaataaaaagaaaaagccatcgatagaaatatcgatggctttatgtactctatttatacaatacagcaccgctctttttagttatatatgtgcagttcgatggtatatctttatttataaaagacattgcacctatttttacattatccccaattttacgggataatccaatgatgcaacaattagctccgatatcaacgttgctaccaatttttactcttgaaccaggtatgtcaccatctatctgtccaatggtcgtattctgtcgtaacaccagattttcaccagcatcaacagcaaaatgaacaacaattccagcatgatggggaattgttaacccttttccaatatttgcgcccaatccaatttcgcaaccaaatttgttaattattttactgtttaacttcttggctgctttcttatgtaatttattaccattaatatacatttcgttagccaaccgccaccagaaaaggaaattcctgttacgctgctttttctctcttaaaagcctccagatatccatacgtttccgccgaattacttcatgtttccagaagttttttaaattagtagagttcccaaataaaacaaagtgaattgccattaggtaagacagcacgataatctccttaattattatttcagaccacacatgttataaggttaagagattataaaatcctgttgtttattattcaaaaacaattttctgagaaggacatacaacagcaagtcgccagtcaccttcatcaggaaattggcgacatacgttaaatcagagcagccccttaactgagctggccgcgctattaagggatgatgtcaccttatctttgaagccggacaacatatcgctgaacgatgaggattgcaggcgctcccgcaaatcctcatcacagcgttcaagagtcagtgaaaattctatctttttcgccttaccgtagcgatcaaactcggaacgggtcgtattcgtttcagtcagtacatacatgccgtaaatctgcccgacaccatcaatcagaggccagggccgtcctgtatatgcctgcgtggtcagcaatgaaagcgacacttcgccacctgtaatttcaggataaagcacgccggaaagcacaatgcgatcatcacctgcaccgatatactgccagcttgctgaacggttaacgcgttcatttttcacatgccgccagcttttgttttgctgtaactgctgatgcggcaatgtgcgcagctcaaaaacaaacatgccgtagatcatcatcatgaccatgactcctcaatctttatcgtaaaaactgccacgtccggcacgggcgcgccgttccatctctgccctgaccatttcaccgaccagtttcgccagttcgcggggattctgcgtaacaacgttatgcagatgaacatgaatttcaccgcaaaatccggagacagcaggctcccggttacgggaagttgcaggaactgatgccactggcgatcgtatggcctccgccaccgggcgggagctggccgcaacaacagggaccagcgccggaggcagcggagccgagaccacgggtgtgatattaattgcgggggcaggcttactgacctgcgcaatcttctgctcctgccactccccacgaacagcaagtgcgcggggcaggttcttaaagacaatatcgccggggccaatgcgttttttcgtctcatcaaccagcttacctgtgttatcagcaattttgctgagtctgcgtagcgtcccggtattgctgtctgtgagcggtttgttgtctttgggtttatcacctccggtgccattgccattttccacaggcttcggcggattgattttcgccaggtccccctgaagcaaggcaaccttgtcctgaagaatggccgcacgctgtgcgtcttcgattttcttgcgcgccctttccgcttcatccggaaggacaccaagtttttcaagtatccacgccagcgtatccagtagcatttttgcaggtgtcagaacaagttgtaacgcaccgccaagaacgttaccgaatacctcgccagcactggtgcatttatccagcgtttccttgctggactccatcggtgacaacagcgatttaaaccagttaaacaccaggctgatcccgcttccgattgcgtcaaaaacagggccaaaccgttcaaaggtttcacgcaacggggtcagcctttccataatcccgctgaacaccccggcaaaaaatgccctgatgggatcccagtatttccagataagaacggcagctccggcaagcgcagccacgataagaccaaccggactgaacagcgccccgatagcgccacccagcaaagaaacagaacccgtcaccattccccacagcgcaggcaacaccctgatgacattcattgaccgggtaagaatgtcgaaaccaagacgcaaggtggccagcttcccgtaaagcaccccaataaccagcgacaacgagccaatcgttgcagtcattgccagcaacgcaccgcctgctatcagtagctggcgcgtcagtaccggatgggcctgcgccagcgaggtgattttttcaagcacccgcgtgagccactgcgtgacagaacgcagcggaccgtcaaccagatcactgatgcgaatacgaagaccttcccatgcgctgtcgagatttttcaggtctccatcaagattatcggccattacttttgcaacgcgatcggcctctccccttgccccctgcaattctctggtcagtttttgcagttctcctgaaccagccgccgcaacaagcgtctgcaaaccaacgaacgcctcttctccggcaatgtccttgaagaaggagacctggtccacctgtccgtatttttgtgtcgccttatagagatcaagcagcacatcctccatcgggcgcattttgcctctggcgtcagcaactgacacccccagctctttcagtgcatcagccgcagcttttggcggtgatgcaaggcgggacagacttgcgcgcatggccgtaccagcatcgcttccgcgaagaccattattggcaagcatcccggccatggccgccgcttcttcaagactgataccaagttttgcggcaaccggaccggtatacttcatggtttcgcccagcgcgcgtaaatcagtattggtccgggtgaatgctgctgtcagcgtatcgccaacccggtccatttgatcggctgtcaggttgaactgtgtgaggatattggagcctatatcagccgtctcgccgagttcgacgccacctgccagcgccatattaagaacaccgggcaatgcggcctgaatggcctgcggagtaaaaccagccattgccagaaagctctgcccactggcggcatcactcgcagtaaactgtgtttcagaaccaagttttaacgcctgctcacgcagcgccttaaactgcgggctgtttttgtcgattcgcgtcagtgcctgaacgcgggacatctctttgccgaacccgatcgcaggctgcaaaaaacgcccggcagcatagccgccagccgctgcagcaccaattgccagcgcaccacctgttttcagttttcccgcggtttcctgcgcgcgcgaataccgctcacgcgcccgcgttacacgcgcaagcgcctgccgttcgcgttcaagctggttgttgtactgttcggtgcgtctgatggcctgctggatggtgttatcgctgcctgtcagggaaatgccgtggcgtttcagctctccgccaagctcccgcattttctgaatttcccgtgtgcgcgattcattcaggcgttcaagccgggtgcttaactgctgcatcagcttttgttgtttttcgctgagcactgtacccgtgcgttgtaactgattaagggcgttaagctggcgtcgtgctttcacgatgccagcatccgctttactgacagcgtcacgggcgcgctcaaatgaacgcgcctgacgctcgagatttttgatcgccccctgcgttcgctggatggagtcaccaaactgccccatcaggcggcgggcgttttcggcaggccgggtcagcctgtcaacggcgctgaaagcgacccggatatcaagagtcttcattatctgcattcccgctgcgaagtgccgcccgctcgcgccagctaaccacttcgccgggcgtcatcatgaagatttcggcgggcgaccagttaaaaatggcggcaatatccgccaccagatcttcgatgtgctcaaagcacaccagggtgattacgctgccgtctcctgcacgctcttcgcgccagagtctggctcgctcataaaatttacagccactgcgcacaactgaataaaatcgcgtgacgacatttttttaatcatcacttcatccagtcgtggcgaggtcacgcgaggcaacagcgtaaacatggtatccgctttcagattcagcacatcagacagcgacagaccacgcagggatccagcctgctcaatagccccggtgatctccacatacgtgattttttcgccaccacgctcaattggtcgggtcagttttacgccacgttcgacagccatatcctcacctgccgtcacatcatccgccacggtgttattccgggtttcagtatcgatgtctttcatcagttgtctccttttcagtcaaaggcgacgcactgcgccgcctgcatattacttatcagccaagcccaagcgcggaacggatacggtcaggcacaatgtccttgccgtccttccggtagatgtggttcaacaggtcgatttcccacagcgggcgatcgttaacgctcagcttgtagtaggtgtttttgacagcgtaagtgtgtgatgtggcttcgccctgtttggcttcccccatatcaatttccgtcacacgcccgcgcatctcgatttcatacagatcgctttctgcatcggtgtagtattcacccgcaaaacgcagcagcgtgccgtcaatcgtgccgccatatttaaggaacagcgcacgaacagctccccccatgacaaaactcgcatcaagcgcggagtcgtccagaccgagatcaatacttaccgcccccatcatgccaccaccacgatagctgtcggttttgcgcgtcagtttgggcggcgtgacggatgtcactttacccacttcgttttcaccatccacaaacaacgtaaaaaagcgaagatgttttggtacagccatcaggcacctcccagcaccgcaaatgcgggaccaaagaattcatcagtaaacgtctggtaaagctccatgtcttccagcgggggaacaggcgtatatttgtagcgaatacgcacacgtccctgacgtaaattcgtggtgccgttatccaccacgtcataccagcactccgcaccaatcagtttcccggcagtaaccagcgaatccagttttgccctgatggcgctgataacatccttcacgttcgcaggtgtcagtggactgtcgatggtttcaaactgcgcttccgcaattgaatcagccagcacctgtgcggttcgggtatacacctcaaagatgtaggcgttcgtttccggtgtgcggttgccccagaagcggaacccgttgcgacgaataatggtcgtgatttctttgttgttgaggctattggcatcgctgtcttcggcctgcaacgaccagaacacatgcctggacattcccagcacatttttaaccggaacgttggacagcgatttgtgccagccctgctcatggtcaatgcacgcacgaaggccgcacgcataagcaggcgcggggaacgtttcgtttttgccacttttcgggttgtaggcgatgaagtccggccataagagcatcacctcacgttcgttgaatttctggcggtaggtaatcgcctcagccatcgtgttacagccgtgacatgaggcatacacaaacgcgcgcagtttacctgcaatcacgcacagggattttgttacagcctccgtgtccagctccggcgcggccagaatacgcggacggtatccgatgctttcatcctgctctgcaacaagcagcgcatacatccccgtatagctgccgtcatcctcagaaccaccgataaccagttgatcctgcgtctttccgtcttcttctttgtgttcagccacgcgaacgacgatcacctttgtgctcacctggtctgcgatggccttaagcgcacgataaagcgtccccgttgtcccgcattttcccagcacgtcattgacgcgggtcagcagtgtgggcttattcagcgggaacagcttcgcgtccgcatcatccgccgttgccacgataccgataacgctggaatcaacatcgttaatcgctgttaccaggtcggtattttccgtaacacgggcaccatgaaaacgagtttcactcatagcttcagccccttgtatccgttaaatgattcggcaacaatcatcacccaccacgtgcgtaatctcacccctgcgccgttctcccgccacggcgacaacaaaaagcagtaaccccctccgcacgcacatgcgaccatgccgcacagggagggaacagatgaccgataccaccatgcaattgctcagtcagggcacagaccccgtgaaaatgccggattttgatattctcgcggagggtaaaacgctgtcaggcgtggcagagcgcctgatgagcctgtcactgaccgacaaccggggatttgaggcggaccagctcaccatcacgctggatgatgcggatggtcagttgcagctaccgccacggggcgcgcgcctgacggttctcattggctggaaaggagaaccgctgacagaaaaaggcacttacattgttgatgaaatcgctcacgaaggaccgccggacaggctgactgtttcagccagaagcgcagattttcgggatgaatttaacgttaaacgtgaggtgtcctggcatgatgtgaccgttgagcgcgtggtatctgccatcgctcatcggtacggtctgaaaccgcaaatcagcgaaatgctgatggatatcgaaatcgaccacgccgaccagaccgaagaaagcgatatgtccttccttacgcgcatggcggaaatgctgggcgcaatcaccacggtaaaaagcggcaatctgttattcatcatgccaggtggtggcgtgaacgcacagggccagccgttgccctcgttcgccattacacgcagcagcggcgatcgccatcagttccgtattgctgaccgcgaggcgtatacgggggtacgcgcctactggcttgatcttaattacgggaaaaagaaaaaagtcagcgtgaaacgccgtaaaccgccaaaacccaaaaaggagaaaagcagcagccgtgaaggtgattatatggaaggcgcggaaggcaatgtgtttgtgttacgcaagacttatcagaacgagcaggcagcaagacgcgcagcggcggcaaagtggcagcagctacaacgcggagccgcatcattctccatcacgctggcatgtggtcgtgcagaactctaccccgaaatgcatggcacggtaacaggatttaaaagcgagattgataatcaggactggattattgcaaaagccgagcacaccatcgataacagcggctttaccacgcagcttgagcttgaggcaaaaatctcggaatggatagcagaaacagagtgagcaacttagaatagcagcagcaccacgttaagggaggtcgctatgttccgttgtccgctttgtggcgcatctgcccgtatccgcaccagtcgtcctgaaaatgattcaaacaccgtgcggcaaaagtattaccagtgtaacaacctggaatgcggcgtatgcttctcaacactggaagctttccataaattcacatcaaaacacacctccggcgtttcactcttcagaaggtatcccgtggcatgagctgccagcttcacacaggggaaacaatcagatgagtttgcctttacctcagaattaacaggcagaattgccggagtaacaaaaaagcgatagattacgcgcgggtgcctttcggctgatggtcggagggaatacccgaaggccagatgtggaaaggccccggaaaacatttctgtttaaccgaggccctaacatatctaccttaagcaagtgataggttagcgcctctccaacaaaggagcaagcgctatgtcgcaaaaatcgcttacggccatcatgttctgcgtgacggtaatcttcaycatctggatgttgcacggttcactgtgtgagttccggctgaatttgtggggagcggagtttgcggcgttcttacagtgtaagcagtaggaaaaccgcgacgggggagcaatcccccgtcaatcggttgctaaggttggctgaagtggcaccctatctcacagacatgaacaacaaacccgcagcgtaagaactgcgggttttctttttggaactatcactagctagtgtaccgttaacggcacataatgctcgcacaacaaacctgttaaaagagattactcagcattctcctgcttccattgccggatcatttcatcggtaacatcaccctcataacataccacgtcataccctccattacggctatatgcactgcgtccaccacatctactaccattccttgcatgattataaggacacgcacaattgcctggataagattcaatggattctttaattatttcttttttgatctgagcatcagactttcctgttgctgcatatccgctaaaagatactaaacaaaggcagattgccattaataaaccacatcgcataccgatacactctattactaaccaatcatagcccacatcataaaatcgagatgaggagtacaatacctttaacaagaaggtgtcataacgataatatgtcgtgcaattcatcaaaaaaaagatctatatcaaagagatagaactcttatcagtgcttcagacatcggcattcgaggcagcagaaaaacagtaaatctgacgaatttgccttttcccaagatgttgtcagattaaaaagatagattagcgcaggtacctgttggtggattgcaggaggaaaaatgaagtcgagtggaaaaatcccagaaaaatttttgtttaacagaggtcctggttcactatgcgaaatacggaggagctgcagaagaattctgcttcatccttagagtttaaacagcacgtgcactaccattgtttctgcatatcgccacaccatcgccactcaaccgccattgcacaaaatacaaatacaaaaaaaccacccgaaggtggtttcacgacactgcttattgctttgattttattcttatctttcccatggtacccggagcgggacttgaacccgcacagcgcgaacgccgagggattttaaatcccttgtgtctaccgattccaccatccgggctcgggaagaaagtggaggcgcgttccggagtcgaaccggactagacggatttgcaatccgctacataaccgctttgttaacgcgccaaattcttcaggcctttcagccagacatccgcttgaggccgatgtcttttaaactggagcgggaaacgagactcgaactcgcgaccccgaccttggcaaggtcgtgctctaccaactgagctattcccgcattcatcaagcaatcagttaatcacttgattttattatcgtctggcaatcagtgccgccgttcgatgcgttgcattctacttacctggcgcgatgagtcaacgatatttttcaccacttttgatcgtttgctgaaaattacgccgaaacgatcactgatcaagcaaatctgcacgcgcagcgctcaaatattgcaacattgaccacagagtcagtaccgcagccacaaagaaaagtgcaataccggcgtactcaacccaaatgttcggacgccacagcagccaggccaacgccaccatctgggcagtggttttcactttcccaatccaggagacagccacgctactgcgtttacccaactccgccatccattcgcgtagcgcagaaataataatttcacgggcgatcatcgttgccgccggtaaggtcacccaccagctgtgataatgctcggttaccagcaccatggcgatagccacgagaactttatctgcgacagggtcaaggaaagcaccaaaccgggtactctggttccagcggcgtgccagaaaaccatcgaaccagtcagtcaccgccgcgacgcagaaaatgagcgcggcggcaaacggcgaccaggtgacaggcagataaaagaccaatacaaagaatgggataaggatgacacggaacagtgtaagcaacgtagggatattaaattgcataatgacgggtaactatctgttgtcagtaagattacccctatgttgctacagagacatcaatgtttcaacgaccagaagatcttttctgccagaccttgcgaaatacccggcacttttgcaatttcctcgacgctggcgttacgtaaaccttgcaaaccgcccatatatttcaacaacatttgccgacgttttggcccgacgccttcaatggtttccagggaactggtatttttgaccttcgcccgttttttacggtgcccgccaatcgcgtgatcgtgtgattcatcgcgaatatgctggataacatgcagcgcgggagaatctggcggcaaactaaatccctcaccttccggctcaaagaacagcgtttccagcccagccttacgatctgctcctttggcaacgccaagtagcagcggatgatttttatcccatgagacatccagttcggcgaagacatttttcgcctgcgcaagctggcctttgccgccgtcgataaggatcacatccgggatcttactgtcgtcaatggctttaccataacgccgacgcagcacctgattcatcgccgcataatcatcgcccggcgtgatgccagtaatgttatagcgccgatactccgcacgcagcgggccgttagcatcaaacaccacacaggaagcgacggtttgttcgcccatggtatggctgatgtcaaagcactccatccgcttcacttccggcaatttcaacacgctggcaagcgcggtcagtcgctggtgaacggtagattgctgcgaaagtttgctggttaaggccgtcgccgcattggtgcgcgcgagtttcagataacgcgccctatcgccgcgaggtttggtttgaacattaatcttgcgtcccgccagttctgaaagggaatcggcgagcagcgttttatcgctaagattaaaatcgagcaggatctcacccggtaaggtgcgcatctggctgccttgtaaatagaactgacctacgaaggtttccaccacctcgctcagttccgtaccgccaggcactttcgggaaatagctgcggctgccgagcactttgccctgacgaatgaacaatacgtggacacaagccatgcccgcatcgaacgccacaccaataacgtcaaggtcgtcgccggtattggaaacaaactgtttttcggtgacgcgtcgcaccgcctgaatttggtcgcgaatacgtgcagcttcttcaaactccagattctggctggcagtttccatacggctaatcagttgcgtaagcacctgatcatctttgccagacaaaaacaggcgcacatactcgacctgctgagcgtattcttcttcactcaccagtccttcaacgcacggccccagacaacgtcctatctgatattgcagacacggacgcgagcgattgcgataaacactgttttcgcactggcgaatggggaaaatcttttgcagtagcgccagtgtttcacgtacggcatagccattcgggaacgggccgaaatattcacctttagcatgcttcgcaccacgatgcatcgccagacgcggatgggtatcgccactcaggaagataaagggataagatttgtcatcgcgtagtaaaacgttgtaacgcggctgatagagtttgatgtagttgtgttccagcaacagcgcttcggtttctgtatgagtaaccgttacatcaatttgctggatctggggcgaccagcgcttcggttttgcgcgaagcgaggttgctacggaaatagctggaaagccgttttttcaggtctttcgctttgccgacatagataaccgtaccaccagcatcgtacatgcgataaacgcctggctggctggttacggtttttaaaaacgcttttgcgtcaaactgatcactcactgacttgataatgtctccgcattacacagaccatggcgaattgccaggtgagtcagctcaacatcgccatgaatgtttagtttactgaacatacgatagcggtagctgttcaccgttttcggactgagattgagctgttctgagatctcattgaccttctggcccttggtgatcatcagcataatctgcaattcacgttcagacaaactggcaaatgggctttctgttttttctggttcgatctggcttaacgccatttgttgagcgatatcagaagcaatgtaacgctgccctgaatagacagaacgaatcgcactcacgacttcctgcggagccgcgcctttgctgaggtagcccgcagcaccggcctgcatgactttcgctggtaaagggttttctgtatggacggtaagcatgatgattttgacatcagctgtggaacgcgcgattttacgcgtcgcctcaagaccgccaatgcccggcatactcatgtccattagcaccacgtcaacggcatttgtccggcaccacttaacggcgtcttcaccgcacgatgcctcaccgacgacttttataccctttatatcttccagaatgcgtcgtatccctgcgcgcaccagttcgtggtcatcaacaagtagaacgttgatcaaaggaatatctccagaaatagggataacgctactgatagttagtcattcgtatattagcggtttttattgcaactttgaaacgttaaaaatggtgggtattcgatttttctctcgtttttgtcaattcgattgtccacagttatggtcacgcccgtcaccaacggctgaccggatcgtttcacagtaagccctgcgacgaaatgtgacaaaaattacctttattcagcaaaaatgaaaatcagcccgctgaatatgtaacattaattaacccaaacaatacgggcaaaaaacattcatgataaaaatatttattggtcattatattaacgcatttaatagcaccgttgacgatacgctcaaaaaacaaccactgctatttttagcaaagcttatggtatactccgccgccttaacatttttcaccgcaaattttcattgcaacatgacgaggaaaataaatgagtacgcctgatttttctactgccgagaataatcaagaactggcaaatgaagtctcctgcctgaaagcgatgctgacgctgatgctgcaggcgatgggacaagctgacgcgggccgcgtgatgttaaagatggaaaaacagcttgcgctgatcgaagacgaaacccaggctgcagtattttccaaaacggttaagcaaattaaacaagcctaccgtcagtaatataaaaccggctgagagcgtgcctttcagccggtttttgcatctggcacgcagaacagaaaagagatcaaattaagccagtagcggccgcgtaacaggcaacctgcgtcttatttggtgcattaatttttttctgcatgtttttctggtggaaattgaccgtattctcagagattgacaaaatcatcgctatctctgctgatgtcttcccttccgccgtccatttcaaaatttctttttcgcgcttgctgaaattcatctctggcgtcatcactatttcatcatttaaacgcatcagagccatcagactttcgcgcaccagtaactgcatttttaattgcagttcatcactaagaatgggtatttcgcgcgcgctgctacgggaaaaggacaaaaagcccagcgcccggtttggcagcattaaatactgagtgacaccgcggcgtaaaccatgtgcgcgcgcggcttcccataacggctgtgcttcgctgaataagtcatcattccacattaaatggccctgactaaagttttcagggttcagcaccggatcaattgcgagaaagttttttgcctgataataactaacccacgcctcagggtaattggtgtagaaagccactttaggtcgcgtgaatggtaccgggtggcgaacacataacgaatagtaatcgtactccagctgctgagcctgaaactctatttcatggtagacctcttctgcggcctccatcctctgaaaacgcaacagcatcgtgcgacgccagctgaaaaaatccttatcctgcatagtaaaccgcaacgcccctgagagtgagtatcatttataatgataattcaaactatcacataaataagatttatatataatttatattattcaggcaatgaattacttttgcaagccatcgcattctcttatgttattaatgagttatgctgatttgttaagcagttttatcaggcttgaaatggcgtccagccccgacaggtgaatcgtcggggctgattttttcttattattgcagcagaaacttctcgaggaactggcgggtgcgaggctgctcgggatcggcaaataacgcttttgcggccccctgctcgactatccgcccctggtccataaagatcgcccggtccgcaacatcccgggcaaagctcatttcgtgcgtcacaatcaccatcgtgcgcttttcctgcgccagctgacggatggtgttcaggacttcgcccaccagctctggatccagcgccgacgttggctcgtcaaacaaaatcacctcaggacgcattgccagcgcacgtgcaatcgcaacacgttgctgttgaccgccagacaaacgacgtggatagctggtttctttaccggccagcccaactttcgccaacagctcgcgagcgcgcgccgtggcctcttctttcggttcgcctttgacgatcaccggcccttcaataatgttttccagcaccgtacgatgcggaaacaaattaaagttctggaagacaaacccgacgtgctgacgcaactggcgaatcagcgatttttgctgacttaatgaacgtgcagtatcaatagtgatatcgccaacggtgatcgttcccgcttcgggttgttccagcagatttatgctgcgtagcaacgtggttttgccggaaccactcggaccgataattgccaccacttcgccaggctttacctcaaggtcgataccgtgcagcaccgtctgaccgtgaaattttttcaccaggttcttaacttcaatggcactcattttggttctctctcctggcgattaagttgattctcaaaatggttctgcaacgtcgataatactgtcgccatgatccagtagatgagcgaagccgccaggtacatggtgaacacctccagcgtgcgcgaggtaatcaactgcgcctgacggaacagctccggcacctggattgtcgcggccagcgacgtatcttttaccaggctgataaagctgttcgacagcggcggcaacgccacccgcgccgcctgtggcaaaatcgcgcgacgcatggtctgccacggcgtcataccaatactggcagctgcttcccactgacctttatcaatagaagaaatggcggcgcgaagcgtttcggcagcataggcggcagtgttgagcgacagaccaatcattgctgacggaatgggatctaattcgataccaaactgcggcaggccgtaataaatcataaacagttgtgcgatgagcggcgtaccacgaaaaatagagatataaaaacgcgccagccagcgcacgggccagatcggcgacaggcgcatcagcgcgagaataaacccgagcagtaagccaaaaaacatgccgccgatactgagttgcagcgtatacccagcccctttcagcaggaacggcaaggaatcaataaccagttgtatactttcttgcatgagcgtttccggagctaaacgtggggatgataggcgaacagcgcaggcgcgccgccggtatgaataaacagaatcggcccttcatctttgaagcgtttctgactgataccgtcaatcagccccgccatcgcttttccggtatacacaggatcaagcagaatgccttccagccgcgccagcaatttcactgcttccatgccttcatcgttcggcacgccgtagccaggtgcaaaatagtcatcccagagtaaaatttccgctgatgcggtcagctccagttctttcgcaatcgcctgttgtaggttaaccactttcggcaattgatcggcaacggaacgcgacacggtaacgccaatcagttcgctttcaggcataaggtgttccagcccaacagccagtccggcgtgagttccggcactgcccgatgcgaccaccaccgacgaaatattaaccgccccttcacactgttgcgcgatttccagcgcactctccacataacccagcgcgcccagagcattagaaccgccaaccggaatgacatacgggcgaaagccttgtgcttcgactcgcgtcgccagctcttccagttgggcattgggatcggtcagtgcgtcacacatttcaatctgggtattgaacagatccagcaacaaacgattgccgttggttaaatagttttctgcggttgtgccaataggattttccagcagcgccacgcagtgcagaccgagtttcgccgcaactgcggcagtctggcgcacatggttagactggatcgccccggcagtaatcagcgtatcggcaccttcgcgcagagcatctgctgcgagaaattccagcttacgtaatttattgccgcccattgccatgggggtgacgtcatcccgtttgatgaaaatttcccgtccaagataatcagaaaagcgcggcagatattcgagcggagttggcgcgccgataaactccagccgtggaaaacgggttaaattatgcagtggcataacagcctccgatgtgtgttgttgtgattttcttattatgcacgctgaaaacgcgtaaataaaaaaggcgctagtgaaagcgcccttttttgtcattatgctgattatttggtcacatcagcaccaaaccatttttcggaaagagcttgcagagtgccgtctttttgcatttccgcaattgcatcattcaccgctttcagcaggtcttcatttcctttacgcagcgccacgccagactcctgacgggagaatgcttcaccggttactgccagcgtatcgttggttttcttcaccagatccagcgccgccagacgatcaacgaggatcgcatcgatacggcctacgcgcagatcctgatatttggttgggtcatcatcataggtacgcacatcgacaccctgaacattctgccgcagccactcttcatagttggtgcccaggccgacacccacttttttgcctttcagatcagcagccgttttaatggtgccttcgttaccttttttcaccagcgcctgaataccggaaatggtgtaaggggtagagaaatcgtattttttcttgcgctcgtcagaaatggtgacctgattaatcaccacatcaatgcgtttagagtccagcgacgccagcataccgtcccatttggtcggttttagtgacgcctcaacgccaagatgttttgccagctgttgggcaaattccacttcaaaaccggttaatttgccgtcatccccctgaaaactgaacggcggataagtgccttccagccctaccagcagcgtgccgcgctctttaactttattaagcagaccttcatctgcaaaacttttaacgctcatgcccgcaaccagcgctacggccatcacactcatcaatgcctgacgtcccagatgtgctaatttcatatttaccccgaatgttgttatgtctgtttgcagtgtagagccattgtttgtaaacacaaaaacaactccgctacatcttattcttatttaatatatatcagaagcaggcaggctggaggatttctgcacaagtccggtacacgtttgacgctgatagtgttgatacttccgtaatgcgatgcggtaattgttggtgctggtggtgggcagccacggggcgaggatttcatcaaggaaaccgtcccgcagctgatcgagggaaatattttgctcgtgtagatgattccccaaacggcgcagacgaacgacatattcacgcaccgtacctgggctcatttcagtttgctcaaaaagaaattgcttaaagccgataatatcgaaaaaatcactctgcgttttgcagtgtaaatcaccgcaaaatcggcacaatgccgcccatgatttttgttccgtttgccagccattttcatcaagcagcgcgtccaggcgggaaatctcgattttattcactattttgccgtcgcgaacgagggtaatgcgatcgagtaatttacggcaatgcgcgcaatgagtctggctgtgtttaaagtctttaagatagcggcttaatggccgtcttttcaggtgctgcaccatcattaagaactcctggtagtcaaagttaaagtgcggcatttactgacgttataacttacccagtttagtgcgtaaccgtttaatagcctggctgtgtaactgactgacccgcgattccccgacctccagcaccgcgccaatctctttgagattcagctcttcctggtaatagagggttaataccagtttttcgcgctccggcaacgtttcgatggcttccatcacccgctgacgcagattactgtccagcagttgttgtagcgggttttctcgctgatgatcatcagtaaccagttcgatgctatcgccgtgctcttcgcgccactcatcgtaggagaagagctggctgttattggtgtcgagcaacatttggcgataatcggcaatatcgatccctaaacgttccgctacctcagtttccgtggcgttgcggccaagttcctgctccagttgccctattgcctgtgccacttcacgcgcgttgcgtcgcacgctgcgcggcacccagtcacggctgcgaagttcatccagcatagcgccacggatacgctgcactgcgtaagttgtaaatgccgttccttgtagggcgtcatagcgttcgacggcattaagtaacccaatgccgcccgcctgtagcagatcgtcaagttccacgctcgcgggcagtcgaacctgcaggcgcaatgcttcgtgacgcaccagcgggacataacgctgccacagcgagtgtttatccattacaccttcagcggtatagagtgaattcacgataaacagccctgcgttatatgagttatcggcatgattatccgtttctgcagggtttttaatcggacgattagtgggtgaaatgaggggttatttgggggttatcggtaaattgcgggcagaaaaaaccccgccggtagcggggtcaggcaggttaaggccattagccttgtaacagagacagaacttgctgcggtacctggttggctttagacagcacggagttgcccgcctgctggataatctgcgctttcgacatgttggacacttcggtcgcatagtcggcgtcctgaatacgggactgcgcttcaaacaggttggtggtggtgttgttcaggttggtgaccgcagaatccagacggttttgaacggcaccgagggaggagcggaatttgtcgactttagcgattgcggcatccagtgcttttaacggatcggctgtagcggctcccgccacttccgctgcaccaacagttaccgccgccgccgtaccggtaatgactacagtggcttccatgtatttaccggttgcagaatcaacgaccgcatatttagtactgttagacgcggtgtcagtgtaagacagtaaattgacttgtttacccccagcatccttgacatccgcagcagcaattgctgtaccatcagcagccgtcagtttcgccgcgctgaaatccgccatgccggacacggtaaatcctttcagattcaaagtggtactgtcgatttgttgcaagccaatgctgatcgtctggttatcattggcaccaatctgaatcttcatcgaatcgtttttcgacagcacgttcacaccgttgaactgggtctgaccagatacacggtcaatttcatcaagacgggatttgatttcgtcctgaatagaagacaggtcggaatcagagttcgtgccggtagaggcctgaacggtcagttcacgaatacgctgcaagttgttgttaatctctgacagcgcgccttcagccgtctgcgccagagaaataccgtcgttggcgttacgtgcggcctgagtcagacctttgatgttagaagtaaagcggttagcaatcgcctggcccgcggcgtcatctttagcgctgttaatacgcagaccagaagagaggcgctcgatagaagtcgacagcgcagactggtttttgttgatgttgttctgagtgatcagcgagaggctgttggtattaatgacttgtgccataattcattttcctgttttcaagtctacggtttaagtattgggcttccacccttcggcttcgtcgccgtcaaccctgttatcgtctggtcactcacaacctttagaatttttttctagcggtcgaaatactccccttcctcgttgctgttcgtgccattaaggcaaaaaataaatcgtaaactttaccccgcttacgccgataaccccggtattcgttctatacacgtcgcatgattaaggaaactatatggctagtatttcaacgcttggggttggatcggggctggacttaagcagcatccttgacagtctggaggcggcagaaaaatctaccctgacgccgatatcaaaacagcaaagctcttacaccgcgaaactgagcgcctacgggacgctgaaaagtgcactagagagtttccagacagccaacacagcactgaataaagccgatttatttaccgccacctcaaccaccagcagttcatcggctttcagcgccaccaccacgggcagcgcgattgctgggaaatacaccattagcgttagccaactggcgcaggcacagacgctgacaacaaaaaatagtcaaaaagacagtaaagccgccatcgccaccagcgatagcgtactgaccatccaacaaggcggcggtaaagatccggtcacgattgatatcagcgcgggtaactcgtcactttccggcattcgcgatgccattaacaacgccaaagctggtgtcagcgccagtatcatcaatgtgggaaacggcgaatatcgtctgtccatcaccgctaacgatacgggcagcaataacgctatgaaacttagcgtcagcggcgacagcgccctggaaagttttatgggttacaacggaacgccgggtgatagcagcaatggcatgattgaaagcgtcaccgcgcaaaacgccaaactgacagtcaataacgttgagattgaaaacagcagtaacactatcagcgactcactggaagatatcaccctcaacctgaatgacgtcaccaccggtaatcagacactgaccatcagtaaagacacatccaaagctgaaaatgcggttaaagcgtgggtggatgcctataacacattgcaggatacattcagcagcttaaccaaatacaccgctgtcgatgccggagctgaaagtcaggactccagtaatggcgcattactcggtgactccacactgcgtaccatccagactcagcttaaaaccttgctcgccaatactcacagcagttcaaactataaaacgctggcacagattggcattaccagcgatgccagtaccggcaagctggaaatcgcgaccgacaaactgcaaacggcgctaaaaaatgatgccgctggtatcggtgaaatgtttataggtgacggcaaaagtactggggtaaccaccggcattagtaacaacctgaccagttggctctcttccaccgggataatccaggcagcaaaagatggcgtcagcaaaacgctgaataatttgaccgaccagtacaacgcagccagtgaacgtatcgataccttaatgacgcgctataaagcccagttcacccaattagatgtgttaatgaactcgctgaactccactagtagctatctgacacagcagttcgacacctcaaatagcaactcgaaataatcttcaggagagactatgtacgcggcaaaaggcacccaggcctatgcacaaattggcgtcgaaagcgccgtaatgagcgccagccaacagcagctggtcaccatgctatttgatggagtgctgagcgcactggttagagcgcgcctgtttatgcaggacaacaatcagcaaggcaaaggcgtctctttatcaaaagcgatcaacatcattgagaacggactgcgggtgagtcttgatgaagagagcaaagacgaattaacccaaaacttgattgctctttatagctatatggtcaggcgcttgctgcaagccaatttacgtaacgatgtctccgcagtcgaagaagtggaagcattaatgcgcaatattgccgatgcctggaaagagtctttactctccccttctttgattcaggacccagtctgatgaacaatgcaccgcatttgtatttcgcctggcaacaactcgtcgaaaaaagccagctcatgttacgcctggcaacggaagaacaatgggacgaactcatcaccagcgaaatggcgtatgtgaatgcggtgcaggagatcgcacacctgactgaagaggttgccccgtccactacgatgcaggagcagctccgcccgatgctgcgcctgattctcgacaacgaaagcaaggtaaaacagttattacagattcggatggatgaactggcgaaactggtcggtcagtcatcggtgcaaaaatcggtgttaagtgcctatggcgatcagggcggctttgtgctggctccgcaggataacctcttttgaatcttaatgagccgatggctcgcgaataatccgattacggctacgcttctaatattccccttgaatggagtcgaagaatgcgtaatcccacgctgttacaatgttttcactggtattacccggaaggcggtaagctctggcctgaactggccgagcgcgcagacggttttaatgatattggtatcaatatggtctggttgccgcccgcctataaaggcgcatcgggcggctattcggtcggctacgactcctatgatttatttgatctaggtgagtttgatcagaaaggcagcatccctactaaatatggtgataaagcacaactgctggccgccattgacgccctgaaacgtaatgacattgcggtgctgctggacgtggtagtcaaccacaaaatgggcgcggatgaaaaagaagctattcgcgtgcagcgtgtaaatgctgatgaccgtacgcaaattgacgaagaaatcattgagtgtgaaggctggacgcgttacaccttccccgctcgtgccgggcaatactcgcagtttatctgggatttcaaatgttttagcggtatcgaccatatcgaaaaccctgatgaagatggcatttttaaaattgttaacgactataccggagaaggctggaacgatcaggttgatgatgaactcggtaatttcgattatctgatgggggagaatatcgattttcgcaatcatgccgtgacggaagagattaaatactgggcgcgctgggtgatggaacaaacgcaatgcgacggctttcgtcttgatgcggtcaaacatattccggcatggttttataaagagtggatcgaacacgtacaggaagttgcgccaaagccgttgtttattgtggctgaatactggtcgcatgaagtcgataaactgcaaacgtatattgatcaggtggaaggcaaaaccatgctgtttgatgcgccgctgcagatgaaattccatgaagcatcgcgcatgggtcgcgactacgacatgacgcagatcttcactgggacgctggtggaagccgatccttttcacgccgtaaccctcgttgccaaccacgacacccaaccgttgcaagccctcgaagcccccgtcgaaccgtggtttaaaccgctggcgtatgccttaattttgttgcgggaaaatggcgttccttcggtgttctatccggacctctacggtgcacattacgaagatgtcggtggtgacgggcaaacctatccgatagatatgccaataatcgaacagcttgatgagttaattctcgcccgtcagcgtttcgcccacggtgtacagacgttatttttcgaccatccgaactgcattgcctttagccgcagtggcaccgacgaatatcccggctgcgtggtggtcatgtcgaacggagatgatggcgaaaaaaccattcatctgggagagaattacggcaataaaacctggcgtgattttctggggaaccggcaagagagcgtagtgacagacgaaaacggcgaagcgaccttcttttgcaacggcggcagcgtcagcgtgtgggttatcgaagaggtgatttaaatccatccccggcggcaagccggggagatttcattacggcagtggcgtcggtaacggcgctttatccagcgcggcggcacactctgccgtcgggcgatccacacgctccatcgtcataccatcgtactcaatggtgttaccgtcacgctcaacctcgtacagctcacgttttacggtaacgttagtgagatcatcagacatcaatgtcaacttacccggcacggcaatcacccgctgccactgacggcaatccagggtatcgccctctttagtgacaatgaggctgcctatcgcttccggactgaccaacgcacgttgcggccctttggtctgccagtagcccgccagccagtccggcgcgggggttttcacgacattgttatagttttcgacttcggcacagcccgccagcaacatgagcgcacctgcaattgcgagttttttcatcattcgtcctgcatgagaagaaaagaggattgtggcattaaagccctgatgtcgccagcctttccaggttcagagagaaatttgatctaaccattatttttgtgaattattaccccgaaaataaatttgcatggtgtatgattcgcgactcttgtttcaaaccttctgagttcagaggctacattcatgtcatggcagcaattcaaacacgcctggttgattaaattctgggcgcccatccccgcggtcatcgcggcgggtattctctccacttactattttggcatcactggcaccttttgggctgtcacaggtgaatttacccgttggggcggtcagctcctgcagttgttcggcgtccatgctgaagagtggggttattttaaaattatccatctggaaggatcgccattaacccgcatcgacggaatgatgatcctcggtatgtttggcggctgttttgccgcagcgctgtgggccaacaatgtcaaactgcgcatgccgcgcagccgtatccgcattatgcaggccatcattggcggtattatcgccggttttggcgcacgtctggcaatgggctgtaacctggcggcgttctttaccggaattccacagttctcgctgcacgcctggttctttgccatcgccactgccattggttcatggtttggcgcgcgctttacccttctgcccatcttccgtattcccgtgaaaatgcagaaagtttctgctgcctcaccgttgacgcaaaaaccggatcaggcgcggcgtcgttttcgtctcgggatgctggtctttttcggcctgctgggctgggcgctgctgacggcgatgaaccagcccaaactggggctggcaatgctgtttggcgtcggctttggtttactgattgaacgtgcgcaaatctgctttacttcggcgttccgcgatatgtggatcaccggacgtacccatatggcgaaagcaatcattatcggtatggcggtaagtgccatcgggatcttcagttacgtacagttaggcgttgaacccaaaatcatgtgggcgggaccaaacgcggtaattggtggtttactgtttggttttggcatcgtgctggcaggcggctgcgaaaccggctggatgtaccgcgcggtagaaggccaggtgcactactggtgggtcggtctgggcaacgtgatcggctcaacgattctggcgtactactgggatgatttcgctccggcgctggccaccgactgggacaaaatcaacctgctgaaaacctttggcccgatgggcggcctgctggtgacatatttgctgttgtttgctgctctaatgttgattattggctgggaaaaacgcttcttccgccgtgcggcaccgcagactgctaaggagatcgcatgaaaaatatcgttcctgattaccgtcttgatatggtgggtgaaccctgcccttatccggcagtcgcaacccttgaggcgatgccgcagttaaaaaaaggggagatcctggaagtggtgagcgactgtccgcagtcgatcaataatattccactggatgcgcgtaatcacggctatacggtgctggatattcagcaagacgggccgaccattcgttatttaattcagaagtaatccctcattcccgctgtggcccacagcgggaatatcgttgcctctctatcacatagatttaacccgccccctctcctattcttttcagtgtgacctcaggaggtttctatgtgtggacgctttgcccaatcccaaacgcgtgaagattaccttgcgcttctcgcggaagatattgaacgcgatattccctacgatcccgaacctattggcagatacaacgtcgcgccgggaaccaaagtccttctgctcagtgaacgtgatgaacaccttcatctggatccggttttctggggatatgctcccggatggtgggataaaccgccgctgattaacgcccgcgtagaaactgccgcaaccagtcacatgtttaaaccgctctggcaacatgatcgggcaatctgttttgccgatggctggtttgagtggaaaaaagaaggcgacaaaaagcagccttattttatctatcgtgctgatggacaagctgtttttatagccgcgataggtagcacaccgtttgagcgtggtgacgaagccggaagaagtttttgtaagcccgctcagggtctttcagtgactgttgcaatggctgtgagggcgaatctttaagccattgcgtttcagtggcatttttccactcaaccaaccaggaagccattttcccgtaagggatgtatttattaccggcctcatgattctcattctgaagcgccagagcacgattgaaaacgaaacgacatgcgcctgcgaagcgcctcatttcacgctcctgttgaccacctggtcttaaccggaatttgaatgcctgtagtcgtttcatgggccaaatcatactttggcctatgaaaaaagaaaccgatatccgacgcggaaggcattgtgttttcctgaagcatgttcacctagtcttcgttactaaataccgacgtcagatttttgaccatgacgcgacagaaaaactacgcacttacttttcaaatgtatgtgctgattttgaagctgaacgggttgaaatggatggcggaccagatcacgtccatttgttaattaactatcctcccaaactggcgatatccagtctggtaaacagcctcaaaggcgtatcgagtaggttactgcgacgagatcgaccagatattgcagtcaggtattacgacaaaggcgttttgtggagtcctggctattttgtcagtagctgcatcttaacgtatcaactagatttaataacaacgatatccgcacctaaccggatatctaatgtcataagcatccctttaattatcccctcaacctcttgtaactttcccactcttgagctccacatagtccaaacgccggatgcaaaaaaatcacacgtgcatttctgaaattgtgatggaggaagatagtatcaattatatgtgcttagaaacgtccccgattagcgcagaagtcaccggattgttcagactccaataggttgagtatgccgtatttattttccaaaataaaaatcgatgctgttgctccttcataaaatacttttactctctggacgcttttcttagctctcttggtgttatcttaaaacgattatggaacctttcagtaaaacgagaaggacacttgtaaccattttccctggcaatctcgctgatgggttttactgtcgtttgtatagcagacaacgcattatttaacctcacgtcgtccaatatactttgaaaacttactccctcgcttgccagacggcgatgcaatgtggaaacagaaatgtagagatatctcgctaccttgtttgctgtccattttgttccaggttcggatagcattaggttataacaacgacttattaatgattgtttactatctgataaaagtaaacaattaacatgatgtgctcctaatgaaagtagaacgcccattgctaagtgttcctgaatttgcgttgagaagcctcgggaaatagatgtttttagttgctcccaacaatatattaactcggggttctgaggtaagcagaaacctgtcgtgttacgaatttgatcagttatcgcataaaatttttgaaacttttcaattagatcaatgggataataaagcatttctgcaagataaagacctgcttctggataattcgcaatataaaattcatatccacagggaaataatattatctgattattatcaacagttagactatgcgtctcccaattgataactttttttccctgacggatacgacataaagctggcataagaggcttaaccctgtgaatctcatgatgtttatgcatccgtatttcttcaatctttaggttagtcttatcttttgccagcatactcttaccctactttatctcataaactggtgttatctcagcggttgcaattttattggcattaaacatataaccaactaacgctccgctggaattagaatccacaggaattttatcagtttttagagcccatactttaaactggtaatgatggggtttatctcctttgggaggacatgctccaccaaatcctgcataaccaaaatcatttcggccttgaacagcaccagtcggaagttttgtaccatcacgtcttcctgcatcagcgggcaaatatgttacagttgctggaatattagcaacagtccagtgccaccatccactgcctgtaggagcatctggatcatacacagttacggcaaagcttttggtgccttcaggagcaccagaccaagttaatgagggcgatgtattaccaccttcacacccaaatccagaaaatacatgagacgttgtaagttgctctcctgtttttatttcattactagtgacctgaaatgctgcggcctgcgcagaaaatgttatgaatgccaatacacttgaaacgataagttttttcataaaaacctcattgttgtgacctatcgttattttatttgatgtgccttgatctcattatgcataaaggcgcaatgatcgcgcaaatgcaatcataattataaaggtgccccgaacattagccataatatgcacaaatcagattcctgttatctcaaggataattattttttaatgcggtgcacttcgtgacaacaagttaatgactaacacaccggcacaaatcaacatcatgcctatgatagctggcaggtccagtcgttgaccaaaaaatccccaggaaagcaaactaatcagaacgataccgacgcctgaccagatagcataagcaatccctgtaggtatataagccagcgtctgagctaataaccagaatgatgcacaatagcaaataattgtgccaacagagggccataaccgtgtaaacccctctgaaaacttcattaaggttgtaccaatgacctctgcaagtattgcgccaccaagataaatataagggttcatagcatattctttcctgttcatactggagagaattgtactacagtttgaacacaactcaccgttttcatcctggtgtatgtgtatccagggggctctggcgtggcaagagataaaggcaggaacaataatgatcagaaggaaccccaggctaacgaatgagttcactcttcctgggagcaaagcgaagacaaaacatgttatcgcgtttacggatcgtggatggcagaaaactttcaggatcaggtatccattttaaaccagaaattgagtgagtttgccccatccatgccccacgctgtgggatcggatataataaacaagcatagtcaacaggttacaaaacctacacctgcatggacatcacttcctgatacgccgccaccagcttattacgcacctgaatccccatttgcatagaaactgaggctttttgcatatcggtcatcacatcgtttagcgccacgccgggctcaccgagggtgaatttttctgcctgcgtgcgggcggctgtttgtgtatcgcttatgcgatcgagcgcggcgtgcagctgcccggcaaaactaattgtcggttgcggcagtgattcctgcgcacgcgcactcatcgccgtggtctgtaactggctgataaccccttcaatcccctgtatcgctgacattttcatctcccggataatttctggtagcaaagcctaccagtaagtcaataagacaaaggcgctaaatagcaacaaaaaaacgggtttattggcggatagaaaaaaacgaaagcacaaataatgggagcgtcaatttttcgagtttgctgacccgggagtgagtcttgttccactttgccaataacgccgtccataatcagccacgaggtgcgcgatgaatgcgactgcagcccagacaaaatctcttgagtggcttaatcgcctgcgtgcgaatccgaaaattccattgattgttaccggttccgcggcagtggcggtcatggtcgcactgatcctgtgggcgaaaacccccgactaccgtacattattcagcaatctttccgatcaggatggtggcgcaattgtcagccaactgacgcaaatgaatattccttaccgcttcagcgaagccagcggcgctattgaggttccggcagataaagttcacgaactgcgcctgcgcctggcgcaacaaggtttgcccaaaggcggcgcggtcggtttcgaactgctcgatcaggaaaagtttggtatcagccagttcagcgaacaggtgaattatcagcgggcgctggaaggcgagctttctcgtaccatcgaaactataggcccggtaaaaggggcgcgcgtacatctggcaatgccgaaaccgtctttattcgtccgtgaacaaaaatccccttctgcatcggtgacggtaaatctgttacccggccgcgcactcgatgaagggcaaattagcgctattgtacatctggtttccagcgcggttgctggtctgccgccaggaaacgtcacgctggtggatcagggcgggcatctgttaacccagtccaataccagcgggcgcgatcttaatgacgctcagttgaaatatgccagcgatgtcgaaggccgtattcagcggcgtattgaagcgatcctgtcgcctattgttggtaacggtaatattcacgcccaggtcacggcgcaactggacttcgccagtaaagaacaaacggaagaacagtatcgccctaacggtgatgaatctcatgcggcgcttcgttcacgccagcttaatgagagcgagcaaagcggttccggttatccgggcggcgtaccgggggcgttgtcgaatcaaccggcacctgcgaataacgcaccaatcagcacgcctccggcaaatcaaaataaccgccagcagcaggcgagcaccaccagcaatagtgggccgcgtagcacacagcggaatgaaaccagtaactacgaagtcgatcgcaccattcgtcataccaaaatgaacgagggcgatgtgcaacgtctgtcagtcgcggttgtggtgaattacaaaaccttgccagacggtaaaccattgcctctcagcaacgaacagatgaagcaaattgaagctctgacccgcgaggcgatgggcttttctgaaaaacgcggtgattcgctcaatgttgttaactcgccgttcaatagcagtgacgaaagcggcggagaactgccgttctggcaacagcaagcgtttatcgatcagttgctggctgccggtcgctggttgctggtactgctggtggcgtggctgctgtggcggaaagcggtacgcccgcagttaacacgtcgcgccgaggcgatgaaagctgtacagcaacaggcgcaggcccgtgaggaagtggaagatgcggtggaagtccgcctgagcaaagacgaacaactccaacaacgacgcgctaaccaacgtctgggggcagaagtcatgagccagcgtatccgtgaaatatctgataacgatccgcgcgtggtggcgctggtcattcgccagtggataaataacgatcatgagtaacctgacaggcaccgataaaagcgtcatcctgctgatgaccattggcgaagaccgggcggcagaggtgttcaagcacctctcccagcgcgaagtgcaaaccctgagcgctgcaatggcgaacgtcacgcagatctccaacaagcagctaaccgatgtgctggcggagtttgagcaagaagctgaacagtttgccgcactgaatatcaacgccaacgattatctgcgttcggtattggtcaaagctctgggtgaggaacgtgccgccagcctgctggaagatattctcgaaactcgcgataccgccagcggtattgaaacgctcaactttatggagccgcagagtgccgccgatctgattcgcgatgagcatccgcaaattatcgccaccattctggtgcatctgaagcgcgcccaggccgccgatattctggcgttgttcgatgaacgtctgcgccacgacgtgatgttgcgtatcgccacctttggcggcgtgcagccagccgcgctggcggaactgaccgaagtactgaatggcttgctcgacggtcagaatctcaagcgcagcaaaatgggcggcgtgagaacggcagccgaaattatcaacctgatgaaaactcagcaggaagaagccgttattaccgccgtgcgcgaattcgacggcgagctggcgcaaaaaattatcgacgagatgttcctgttcgaaaatctggtggatgtcgacgatcgcagcattcagcgtctgttgcaggaagtggattccgaatcgctgttgatcgcgctgaaaggggccgagcagccactgcgcgagaaattcctgcgcaatatgtcgcagcgtgccgccgatattctgcgcgacgatctcgccaaccgtggtccggtgcgtctgtcgcaggtggaaaacgaacagaaagcgattctgctgattgtgcgccgccttgccgaaactggcgagatggtaattggcagcggcgaggatacctatgtctgataatctgccgtggaaaacctggacgccggacgatctcgcgccaccacaggcagagtttgtgcccatggtcgagccggaagaaaccatcattgaagaggccgaacccagccttgagcagcaactggcgcaactgcaaatgcaggcccatgagcaaggttatcaggcggggattgccgaaggtcgccagcaaggtcatgagcagggctatcaggaaggactggcccgggggctggagcaaggtctggcagaggcgaagtctcaacaagcgccaattcatgcccggatgcagcaactggtcagcgaatttcaaactacccttgatgcgcttgatagtgtgattgcttcgcgcctgatgcagatggcgctggaggcggcacgtcaggtgatcggtcagacgccaacagtggataactcggcactgatcaaacagatccaacagttgttgcagcaagaaccgttattcagcggtaaaccacagctgcgcgtgcacccggatgatctgcaacgtgtggatgatatgctcggcgcaaccttaagtttgcatggctggcgcttgcggggcgatcccacactccatcctggcggctgtaaagtctccgccgatgaaggcgatctcgacgccagtgtcgccactcgctggcaagaactctgccgtctggcagcaccaggagtggtgtaatgaccacgcgcctgactcgctggctaaccacgctggataactttgaagccaaaatggcgcagttgcctgcggtacgtcgctatgggcgattaacccgcgctaccgggctggtgctggaagccaccggattacaattgccgctcggcgcaacctgtgtcattgaacgccagaacggcagcgaaacgcacgaagtagaaagcgaagtcgttggctttaacggtcaacggctgtttttaatgccgctggaggaagtggaaggtgtcctgcccggcgcgcgggtttatgccaaaaacatttcggctgaaggactgcaaagcggcaagcagttgccgctcggtccggcgttattaggtcgcgttctggacggcagcggtaagccgctcgatggcctgccctcccccgatacgacggaaaccggtgcgctgattaccccgccatttaacccgttgcaacgtacaccgattgaacatgtgctggacaccggcgtgcgcccaatcaatgccctgcttaccgttgggcgcgggcagcgtatggggctgtttgccgggtccggcgttggtaaaagtgtgctgctggggatgatggcacgttacacccgcgccgatgtcattgtcgtgggtttgattggtgaacgtgggcgcgaagtaaaagattttattgagaatatcctcggtgccgaagggcgtgcacgctccgtggtgattgccgctccggcggatgtctctccgcttctgcgaatgcaaggtgccgcctatgccacgcgcattgccgaagattttcgcgatcgtggtcagcatgtgttgctgattatggactccctcacccgctacgcgatggcccagcgtgaaattgcgctggcgattggcgaaccacccgccaccaaaggttatcccccgtcggtgtttgccaaattaccggcactggtcgagcgtgccggaaatggcattagcggcggcggatcgattaccgcgttttataccgtgctcaccgagggcgatgaccagcaggaccccattgccgactccgcgcgggcaatcctcgacggtcacattgtgctgtctcgccgactggcggaagccgggcactatccggctatcgatattgaagcgtcgatcagccgcgcaatgacggcgttgatcagcgagcaacattacgcgcgagtgcgcaccttcaaacagctgttgtcgagttttcagcgtaaccgagatctggttagcgtcggcgcgtatgccaaaggcagcgatccgatgctcgataaagccatcgccctgtggccgcagctggagggctatttgcaacaaggcatttttgaacgcgcggactgggaagcgtctctccaggggctggagcgtattttcccgacagtgtcataacccaggagataacggcagatggcagaacatggtgcgctggcgaccctgaaagatctggcagaaaaagaggtagaggatgccgcgcgcctgctgggtgaaatgcgtcgcggatgtcagcaggcggaagaacagctcaaaatgctgatcgattatcagaatgaatatcgcaataacctcaatagcgatatgagtgccgggatgaccagcaaccgctggatcaactatcagcagtttatccagacgttggaaaaagccattactcagcatcgccagcaacttaatcagtggacgcagaaagttgacattgccctgaacagctggcgagaaaagaaacaacgtttgcaggcctggcagacactgcaggaacggcaatccacggcggcactgcttgcagaaaaccgcctcgatcagaaaaagatggatgagttcgcccagcgcgccgccatgaggaaacctgaatgattcgcttagcgcccttgattaccgccgacgttgacaccaccacattgcctggcggcaaagccagcgatgctgcacaagattttctcgcgttgttgagcgaagcattagcaggcgagacaactaccgacaaagcggccccccagttgctggtggcaacagataagcccacgacaaaaggcgagccgctggtcagcgagattcttgccgatgcgcaacaagcggatttactgatccctgtggatgaaacaccgcctgtcatcaacgacgaacaatccacatcaacaccattaaccaccgctcaaacgatgacgttggctgcggtggctggcaacaatacggcaaaagacgaaaaagcggatgatctgaatgaagacgtcaccgcaagcctgagcgccctttttgcgatgttgccgggttttgacaatacgcccaaagtgactgatgtgccgtcaaccgtgttaccggcagagaaaccaacgctcttcacaaaactgacttctgcgcaactcacaacagcacagcctgatgatgcccccggcacgccagctcagccattaacaccgctggtagcagaagcccagagtaaagcggaagtcatcagcacaccttcaccggtgaccgctgccgccagcccgctaatcactccacaccagacacagccactgcccaccgtcgccgcgcctgtgttgagtgcaccgctgggttctcacgaatggcaacaatcattaagccagcatatttcgctgttcacccgccaggggcaacaaagtgcagagttgcgtctgcacccgcaggatttaggtgaagtgcaaatctccctcaaagtggatgataaccaggcgcaaatccagatggtttcaccgcatcaacacgtacgcgccgccctggaagcagcgcttccggtactgcgaacgcagctggccgaaagtggcattcagttagggcaaagcaacatcagtggcgaaagctttagtggtcagcagcaggccgcttcccagcaacagcaaagccaacgcacagcaaaccatgaacctctggcgggggaagacgacgatacgcttccggttcccgtctctttacaagtacgtgtaacaggcaacagcggcgttgatattttcgcctaacgtcagaggtagcaccgtaatccgcgtcttttccccgctttgttgcgctcaagacgcaggataattagccgataagcagtagcgacacaggaagaccgcaacacatgactgattacgcgataagcaagaaaagcaagcgatcgctttggatcccgattctggtattcattaccctcgcggcctgtgccagcgcaggttacagctactggcattcgcatcaggttgccgctgacgacaaagcgcagcaacgcgtcgtgccctccccggtcttctatgcgctggatacctttacggtcaatctgggcgatgcagatcgcgtactttatatcggcataaccctgcgcctgaaagatgaagctacccgctcgcggctgagtgagtatttgccggaagtccgtagccgtttgctgttactgttttcgcgtcaggatgctgccgtactggcgacagaagaaggcaagaaaaacctgattgccgagattaaaaccacgctttccaccccgcttgttgccgggcaaccgaaacaggatgtcaccgacgtgctgtataccgcttttattctgcgataacgacatgggcgatagtattctttctcaagctgaaattgatgcgctgttgaatggtgacagcgaagtcaaagacgaaccgacagccagtgttagcggcgaaagtgacattcgtccgtacgatccgaatacccaacgacgggttgtgcgcgaacgtttgcaggcgctggaaatcattaatgagcgctttgcccgccattttcgtatggggctgttcaacctgctgcgtcgtagcccggatataaccgtcggggccatccgcattcagccgtaccatgaatttgcccgcaacctgccggtgccgaccaacctgaaccttatccatctgaaaccgctgcgcggcacagggctggtggtgttttcaccgagtctggtgtttatcgccgtggataacctgtttggcggcgatggacgcttcccgaccaaagtggaaggtcgcgagtttacccataccgaacagcgcgtcatcaaccgcatgttaaagctggcgcttgaaggctatagcgacgcctggaaggcgattaatccgctggaagttgagtacgtgcgttcggaaatgcaggtgaaatttaccaatatcaccacctcgccgaacgacattgtggttaacacgccgttccatgtggagattggcaacctgaccggcgaatttaatatctgcctgccattcagcatgatcgagccgctacgggaattgttggttaacccgccgctggaaaactcgcgtaatgaagatcagaactggcgcgataacctggtgcgccaggtgcagcattcacagctggagttggtcgccaactttgccgatatctcgctacgcctgtcgcagattttaaaactgaaacccggcgacgtcctgccgatagaaaaacccgaccgcatcatcgcccatgttgacggcgtcccggtgctgaccagtcagtacggcactctcaacggtcagtatgcgttacggatagaacatttgattaacccgattttaaattctctgaacgaggaacagcccaaatgagtgacatgaataatccggccgatgacaacaacggcgcaatggacgatctgtgggctgaagcgttgagcgaacaaaaatcaaccagtagcaaaagcgctgccgacgcggtgttccagcaatttggcggtggtgatgtcagcggaacgttgcaggatatcgacctgattatggatattccggtcaagctgaccgtcgaactgggccgtacgcggatgaccatcaaagagctgttgcgtctgacgcaagggtccgtcgtggcgctggacggtctggcgggcgaaccactggatattctgatcaacggttatttaatcgcccagggcgaagtggtggtcgttgccgataaatatggcgtgcggatcaccgatatcattactccgtctgagcgaatgcgtcgcctgagccgttagtgatgaataaccacgctactgtgcaatcttccgcgccggtttctgctgcgccactgctgcaggtgagcggcgcactcatcaccattattgccctgatcctcgctgctgcctggctgataaaacggctgggatttgcccctaaacgcactggcgttaacggtctgaaaattagcgccagtgcttcgctgggcgcgcgtgaacgggttgtggtggtcgatgtggaagatgcacggctggtgctcggcgttaccgcagggcaaatcaatctgctgcataaacttcccccttcagcaccaacagaagagataccgcagaccgattttcagtcggtcatgaaaaatttgcttaagcgtagcgggagatcctgatgcgtcgtttattgtctgtcgcacctgtccttctctggctgattacgcccctcgccttcgcgcaactgccgggtatcaccagccagccgctgcctggcggtggacaaagctggtcgctcccggtgcagacgctggtgttcatcacctcgttgacgtttattccggcaattttactgatgatgaccagtttcacccgcatcatcattgtttttggtttattgcgtaacgcgctgggaacaccctccgcgccacctaaccaggtattgctggggctggcactgtttttgaccttttttattatgtcaccggtgatcgacaaaatttatgtcgatgcgtaccagccatttagcgaagagaaaatctcaatgcaggaggcgctggaaaaaggggcgcagccgctgcgtgagtttatgctgcgtcagacccgcgaggcggatttagggttgtttgccagactggcgaataccggcccgttgcagggacctgaagccgtgccgatgcgcattttgctcccggcctacgtgaccagcgagttgaaaaccgcatttcagataggcttcacgattttcattccttttttgattatcgacctggtgattgccagcgtgttgatggcattggggatgatgatggttcccccagccaccattgctctgccctttaaactgatgctgtttgtactggtggatggttggcaattgctggtcggttcgctggcgcagagcttttacagctagagaggcaaaatgacacctgaatcggtcatgatgatggggactgaagcgatgaaagtcgcgctggcactggctgccccgctgttgctggtggcgctggtcacgggtcttatcatcagtattttgcaggccgccacccagattaacgaaatgacgctgtcgtttattccgaaaatcatcgccgtatttatcgccattattattgccggaccgtggatgctcaatctgttgctggattacgtccgcaccttgttcactaacctgccgtatatcatcgggtaggccgtacaatgatgcaggtgacaagcgatcaatggctttcctggttaagcctgtacttctggccgttactgcgcgtgctggcgctcatttctaccgcaccaattctgagcgaacgcagcgtgccgaaacgggtaaaactggggctggcaatgatgatcacgttcgccattgccccatcattacctgccaacgatgttcctgtttttcgttctttgctctgtggctggccgtgcagcagatcctgatcggcattgcgcttggttttaccatgcaatttgcctttgccgctgtgcgaaccgctggcgaaattatcggtctgcaaatggggctgtcatttgcgacgtttgtcgatccggccagccatctcaatatgcccgttttagcgcgtatcatggatatgctggcgttactgctgttcctgacatttaacggtcatttatggttgatttcactgctggtcgatacctttcacaccctgcctattggtggcgaaccgttgaacagcaatgcgtttctggcactcaccaaagcagggagtttgattttccttaacgggctgatgctggcgttaccgctcattactctgctgctgaccctgaatctggcattaggtttactgaatcgtatggccccgcaattatccatttttgttattggatttccattaactctgactgtcggtatctctttaatggcggcattaatgccgttaattgcgcctttttgcgaacatttattcagtgaaatttttaatttgctggctgatattattagtgaattgccattaatataattccgtaacgtttatcatgttatcctaaggattatccgaaaaataatacctacgaacatcttccaagatactcctgcagcgaaatatttgttttaagctcactcacatatcgcaacatttactttactttaagacaattccaggcaaattatacaacactttacgggatagtaagtccgcctgaaaaatcgcgagagtggcgcattaggtgacccatgttgttccgtttagtcatgatgaaatattcaggtaaggggaattatcgttacgcattgagtgagggtatgccatgtcaacgattattatggatttatgtagttacacccgactaggtttaaccgggtatctgttgagtagaggggttaaaaaaagagaaatcaacgacattgaaaccgttgatgaccttgccatagcttgtgattcacagcgcccttcagtggtgtttattaatgaggactgtttcatccatgatgcttctaacagtcagcacatcaagcacatcattaatcaacatcccaatacgttatttatcgtttttatggcaattgccaatgttcattttgatgaatatctattggtcagaaaaaatttattgataagttctaaatcgattaaaccggaatctctcgacgatatccttggcgatattctgaaaaaagagacaacgataacctcgtttttaaatatgccgacgttatcattgagccgaaccgaatcgagtatgttgcgaatgtggatggcaggtcagggaaccattcaaatctctgaccaaatgaatatcaaagccaagaccgtttcatcgcataaaggtaatattaaacgtaagatcaaaacgcataataaacaggttatctaccatgtcgtccgactgacggataatgtgactaatggtatttttgtcaacatgcgctaacacattctgactggtggtttcccaccagtcaggctgaataagattactctgctttctccacaaagataccgtcctgatgccctgcttcattaaaaaaccagatgccgagcgggtagtcttccagcgaaaccaggtacattgtgccttcactaaactcctcaactgccagtaccacgccaggacgacgcggaccgccatccgttttgactgttacccgatcattcaccttcatcgttttcctcctgtgcctttgtgccagtgtagaacaatttcgtttttctggcagcgccaggcgcgcgcgagtgctgattttctcgacggtctatacttaagtgatgccaggcggacttaacgactggcggcaacaacagagtaacagttgcgaggaaagatgatgaaaaccgcaaaagagtacagcgataccgcaaaacgtgaggtcagcgtcgatgtcgatgccctgctggcggcgatcaatgaaattagcgaaagcgaagttcatcgcagccagaacgattctgaacacgttagcgtcgatggacgtgaatatcatacatggcgtgaattggcggatgccttcgaactggatattcatgacttcagcgtctctgaagtgaatcgttgaatgcacaataaaaaatcccgaccctgagggggtcgggatgaaacttgcttaagcaagaagcacttaaaaaattcgttacaccaggaaatctgatgtgttcatcaccttatccgcaatttttttcgctgacaagaaaatattcgctatatgaatgattaacgctacttatgaatagaaatgtgacgcacgtcaccccttggtggctctggcgtcagcgggatcgctcccgaacaaaatcatctttgataatttgtgctgttttgagaatcatcctggtaaggggagtactgcgcgactatgttttcaattcaacaaccactactggtttttagcgatcttgatggcaccctgctggacagtcatagttatgactggcaaccggcagccccctggctcacccgtttacgcgaagcaaatgttcccgtcattctctgtagcagtaaaacatcagcggaaatgctgtacttgcaaaaaacgttggggctacaaggtttaccgctgattgccgaaaatggcgcagtgatccagcttgctgagcaatggcaggagatagacggttttccacgcatcatctcaggtattagccatggcgaaatcagccaggttttaaatacgctacgcgagaaagaacattttaaattcacgacttttgatgatgtcgacgatgcaactatcgccgaatggacgggattaagccgtagccaggcggcgctgacgcagcttcatgaggcgtcggtaacgctaatctggcgcgacagtgacgagcgtatggcacaatttaccgctcgtctgaacgaactgggcttacagtttatgcaaggtgcgcgcttctggcacgtcctggatgcctctgccggaaaagatcaggctgccaactggattatcgcgacctatcaacaattgtcaggcaaacgcccaaccacacttggcctgggcgatgggccaaacgatgcgcccttactggaggtaatggattacgcggtgattgtgaaagggctaaaccgtgaaggggtgcatctgcatgatgaggatccggcccgcgtctggcgaacgcagcgtgaaggaccggaaggatggcgtgaaggactggaccattttttctccgcccgttaagcgttatcgctcgcgaatacccgattacgcccagcctgtttagcgagataaagccgacggtcggccagtgactggaattgttcaaaatcataatcaccggtttcctcgctgctacttacccccaacgaggcactgatgcgtatcgtcgtactcttagcaatcaacatctctttttcatttaacttcaggcgaatacgttctgcgacttccgcagcctccgtcagactcgcgcctggcagaatcacacaaaactcctcaccaccgacccgcccggcaacgtcctgcgcacgcaaggaactgctaattaatccggcagcatgagaaagaacacggtcgcccgcctgatgaccaaagcggtcattaatcgctttaaaatggtcaagatcgacctgaatgacagaaaaaggatgttggtgcgtctgacacaatttagcgagcggacgggctttttcgaacagtgcgccacgattatataaacgggttaaggtgtcgtgccacgcctgccactgcaacgaactttgcagaacatacatgttgctgaccatccggcgaatcacataccaggagatgagtaacatggtggtaaagagcgcccacagcagggttaatgcaatgctgatactgccgaaatcgccgcgcacgccttcgcttaacgtatggacgcgcaccagcacaccgtcgaaatggtccagacgttcccagctaacatagcgactgtccatacgaatgccgccccgcgtgtcatgttccattgcctacgccagcaaggccagttcacgaggatcaaaaatattccctgttggatggtcaggattggaagaggtcaaaaatctcagcttactgtcatagagctgatactcaccatcgaggtttttatcgatggcgtttcttaaaaattgctgcatagtacgcacgggaatactcatccccagcacgccataccagtagttattactgtctaccggaacactgacggtaacctgcggttcagtattgctggcgtgttccggttgcgaagtgaaccagcgtaccgcgcggtgacgattttctcgttgtgaatggccaataaaccagggttgggtgacatagccgtaataacgcgttggaacattgcgcgtaaacaaggtcggctgcgtcgaaacgtaaaatccggcacgcgagacatacatcgcctgttcaaccatcgacgaggagttgtgcgctagtcgcagcaagtaaccaacttccagtgcagcggtaatttcattgtcgaggctttcattttcgcgagacaggagattcccctcgctgactaatgcatccgacacgccattgactggcagggtgcgccgtcggttgagttcgattttccaggcgtgctcgtcgcgatgctgttcgaactcggttacagcatcacgcagagaggtgaaatccagtggcgctatgagagcttcgcgcatgccattacgcaaaaagatcagtttgtcgacgttatactgcaaatgcttatcgagcgcgttggctacgttttccagatgattacgctggctggagatataggcatcttccagcaccactacttcacgccaggtgagcaaggtggaaaaaagcaataccactataaagcagagattaacgatatgaccaggccccaggcggcgtgcgagttttttcaaccagctctggttttccatttttgtctcgtgctgcaccctgacgactccccacctgcttttttatgattctggcataacctggcgatagcgtaccgcaaaacagcgataattttataatggtggcatgataagacgcgactatcattcattgcaggcattggcacaccaggccggatgtgatccggcctggtcttaatgataccctttcaaacttcttccgcagaacgactcccctcccctggaacaagctcggtttcatgaaaagcttcccgcttgaccccgtaaccgtcataccaacgacactcaaccataccgctggagtatccagtgacaatcatccgcgggccgccctctttaaccgtaacttcctcactaaccataaagctcatactcgcctccttttttcgagtgaaacttgttcaccttagttgaagatggcgaattttgcataatagcttgtgcgagtattaatgtgcctgaccgcgcatttttgctacggctttcactcccagcaccacgatgccgccgatgataaatccaagaatcagatttaaaacagtcggtaatatcatcgccaccactgcactttgctgcccggcgaaatgttcaatggcgtgatgcagcggcgcaataccatgtaccacaatcccgccgccgacgaggaacatcgccagcgtgccgacaatcgaaaacgctttcatcagccagggcgcgataatcaataatcctttacctaatgcctgcatcagcgcgctggatttttccgccagccaataccccaggtcatcaatcttaacgataacccctaccagaccgtagacgcccacggtcactaccagcgcgatgcctgaaagcaccagcacctgattaagcaacggcgcttcggccacaatccccagcgtgatggcgacgatttccgcagacaatataaaatcggtacgaatcgccccttttattttgtccttttcaaacttcagcggatcctgcgccgccagcttctccagacgctgctgactctgcgccggatcttctttatgtttacgcgcctccagcatatgcagcactttctctaccccttcaaagcagagaaacgcgccaccgatcatcaacaatggcgtaatcgcccacgggataaacgcactgataatcagcgccagtggcaccagaatcactttattgatcagcgatcctttcgccacgccccagaccacgggaagttcccggttggcccgcacacctgaaacttgttgcgcattgagcgataagtcatcccctaatacaccggcggttttcttcgccgccagtttgcccatcacggagatatcgtccagcagtgtggcgatatcatcgagcaacgtcagtaaactactcccggccaaaagcattccctctcatttttattgttgaagggtgtaagtatgaagcaaaaacggcagctctgatacttgcttcacaggtcaacatttttttaacaatcaagtgcaattatatctctcgccagcagaatgattttcacgtttactatgaaccacctttttatttccaccgtgagggattatgcgtttccgccagttattaccgctttttggcgcgctgtttgcgttgtatatcatttggggctcaacctattttgtcattcggattggcgtggaaagctggcctccattaatgatggcgggcgttcgattcctggcagccggtattttattgctggcatttttgctactgcgcggacacaagctccccccgctacgtccgctgctcaatgccgcgctgattggcctgttattgctggctgtcggtaatggcatggtgacggttgccgaacatcaaaatgttccttccggcatcgccgccgtagtggttgcaaccgtgcccctctttaccctgtgcttcagccgcctgtttggcattaaaacgcgcaaactggaatgggtgggtattgccattgggcttgccggaatcatcatgctcaatagcggtggaaatttaagcggcaatccgtggggcgcgattctgattttaatcggctcgattagctgggcgtttggctcagtttatggctcgcacattaccttacctgtagggatgatggcgggtgcgattgagatgctggcggcaggcgtggtgttaatgatcgcgtcgatgattgcgggtgaaaaactgacggcgctcccttccctttcaggcttccttgcggtcggctatctggcgctgtttggttcgattatcgccatcaacgcttatatgtatttaatccgcaacgtcagtccggctctcgccaccagctacgcctacgttaacccggtggtcgcggtcttgctgggtacgggactgggtggagagacgctttcgaagattgaatggctggcgctcggcgtaattgtcttcgcggtggtgctggtcacgttgggaaaatatctctttccggcaaaacccgtagttgcgccagttattcaggacgcatcaagcgagtaaatgaatcccctgcgtgtcgatctgcgcgctggcaccttcgccgcagatccactcttccagacgctcgctaagcgcttcatccgtcagcttctcgcgcccacgtaacgcgcactcccagacaatcaatacgcgccagccgagttcctgcaagcgactgatatcgcggcgatcgcgctcaacatttttacctatcttctccagccagaactcggttcgagtcgcaggcactttaaacagatagcagtgatgatgatgccagaagcagccatgggtaaatatcacgcagcgatattcatcaacgacaaaatccgggcgtccgggcagactggcgtcctgaacgcgaaacgccagtccctgcccggttaacaaactggcgaggcgcttctcaatcgccgtatcacgcgtggcaatcgcgcgcatatttttgctgcgtgtggccttatcgtgaacatcggccatgttgtgcctcttgctgacgcaacgccaccgcctgtttgatttttggctcaagcagttttgccaccgcggcaaagaccggcacgaccaccgagttaccgaactggcgataggcctgagtgtccgaaaccggaatgcggaatttcgcttctcccggcgcttcaaaacccattaagcgcgcgcattcccgaggcgttaaccgacgtggacgatgttgctgattcagcggatcgtcaaagtctttttcacccgtggccatatcccatccgcgatcgattaaaatttccgcgccatctttgtaataacgcgcagacagcgtacgggtgacgctttgcggattgttcggataaaccattccataaccgaagccgttaccgcgcgcctgatgttttttcgcatatcgatagaggtacttccacagtaccggcgtcaggatatatttcgcctcgaccatcgggtccagcagctgcgccagcgtcactcgctgcgcagggaaacatccgctgatatcacgcagagtaaaatcggctttcaggttaagatcgcgacgaaaacccaccagcacgatgcgttcacggtgctgcggcagaaaatgtttaccatcgatgattttcggatcgtccggcccgttatcttctgcatcagccacgtcatagcccagttcgtccagcgtctgcatgatgatgcggaacgttttaccctggtcgtggcttttcaggtttttgacgttttcgagcacaaacatcgccggacgacgcgcgtcgataatgcgcaccacatcaaagaacagcgtgccctgagtatcgcaggcaaaaccgtgcgcccgcccgagcgagttctttttcgatacgccagccagcgaaaatggctgacaagggaaaccggccagtaaaacatcgtgttcaggaatgtgttgacgaatatgttccgccgccgcctcatcactcacgccttctttatggctgagggtgatgtcgcggatatcttcattaaaatgatgcgtcgccgggtcgcaataatgattggctttataagtgcgtaccgcatgtttgttccattcgctggtaaacacgcactgtccgccaatcgattcaaaaccgcgacggatgccgccaattccggcaaatagatcgataaagcgaaacgcataatgcggatgatgtgccggtggtttgggtaacaacgtttgcagatgggcgaactctttctcacttaaacggtgccatgccgagtcattcgccagcgcacgttttaaaattgccgcgctccagtgattctcacccacaccattaagctgagccaccagcgttttaacatcataaatttgcagcagtttctccagcattgcctgtgcggcattcccggtgctgtatgaatcggttactgatatattttcctgcatagatttaaccggccatctgagatggccgacaggttaacataattacagccatttagggccacgcgcttagcccgcgggtgaaaacgcatctatcaccttgtgatcgacaccttcattctcccccgccagttcggcactgagcttcgccataaactcgactaaaaattgcgcgttgtgctgcgccagctgcttgcctcttacggtttgcatggtttgcggtagcttcaacaacttagtctggaaatgatccagcgcgtagcgtttatcatcaagcgggcgatgctgtgcgagcggatcttcggcatcaaacagcgccacgcccaatgcccctgaaacggcaaacacgcgcgccaggccaatcgcccccagggcttccagccgatccgcatcctggacgattttagcttccgttgttaagggggcgatttgcgcgctgaaactgtgagcggcaatggcatgacaaacggcctcaattttctccgccggaaattgctcgaactcttcacagagcaggcgacgcgtctcttctgccgccaggattgaagaacgctgccgctgcggatgatttttcgccaggctcacaatatcgtgaaaataacaggcggttaaaatcaccagcatatcgacatcgtcatctgccgccagcttctgtgccgtagcccagacgcggcgaaaatgacacacgtcatgggccgcgtcctggtgctgatgatggtttttcaaccagttttcgaactgtgcctgccagtgttgtaagtccatacgcgctccgttgccaaagagtcgccaccttagcagtttttattcatagcgtctgctacgtgcgggacgaggtcgggtgtaccaggcaatgctgcctaacaatgccccgaccagagccataaataaaaatccgaccagtgcccctaaccactttcccgcggtagagcctaaatcgctttcaaatcccgacacgggggcatcggggatccggctcatcacccagatgtaacgcgccattgcccagacgaaatagccacaccgtgtatagaaagcccacaaagccagtttgccgccagggctgcgagagagtctctcttccatctttgtcgaaccgtattccattttgagataacccggaaaattcagacttagtactattatgtgataaaagtcacatttttccacattgaatgagccagtcaagactcaatcattttttgaacaaatagataaattttgcgcaacggcagtgaatacagtaaaaatcgttttgagcgattttatttatctttgatatcggctttattaattcatttaatcaatatattagcactgaatacaattatacctttttatttttctgtgtcatgatgcctccgttattagccttttatcgtcttgtttatattttttgggccggcatgatgccggctttttttatgccttcattaatgtgcgcgtgatcacaccaggtgtttggcgtaacaatcattgatactccctatctttccgctcaacttataacttattgatataaattcataattttcatgaatgcttatattcagaattcataattctgaattatattaaatatattagaamcattttgaaatcttttaaatacatttgttacatgtaatccttaaaataaaatgaacttcatagaatagtatccaaatgtgctttttttggataacggcacttattgatatattcatgaagattataatcacaagggaatacataatgaaaagaaaagttctggcaatgctggtcccggcgttattagttgctggcgcagcaaatgcggctgaaatttataataaagatggcaataaagttgatttctacggcaagatggttggcgaacgcatctggtcaaatactgatgataataacagcgaaaacgaagatacctcctatgctcgtttcggtgttaaaggtgaaacccaaatcaccagcgaactgactggttttggtcagtttgaatacaacctcgacgccagcaagcccgaaggtgaaaaccaagaaaaaacccgtttaaccttcgccggtttgaaatataacgagttaggatcatttgactatgccgtaactacggtgttgcttatgatgccgcagcttataccgatatgttagttgaatggggtggcgattcctgggcttccgctgacaacttcatgaatggtcgtaccaacggtgttgcaaccttccgtaactatgatttctttggcctagttgatggtcttgattttgcgattcagtaccaaggcaaaaacagcaaccgtagcactaagaaacaaaatggtgacggctatgcgttgtctgtagactataacatcaatggttttggtatcgttggtgcatatagcaaatctgatcgcaccaacgatcaagttgccgatggaaacggttcaaatgctgaactgtggtcattggctgcaaagtatgacgcgaaaaatgtctacgcagctgtaatgtacggcgaaactcgtaatatgactccgggttctattgatacaggtgttgccgatcgagaaggcaatacaataatgcgtgatcaacttatcaatgaaacccagaactttgaagcggttgttcagtatcaattcgactttggtctgcgtccgtccttaggttatgtgtactctaaaggtaaagatatcaaaggggtacccggacatagatatgttgacgctgaccgtgtgaactacattgaagttggtacctggtactactttaataagaacatgaacgtttatactgcatacaaattcaacatgctggataaagatgaggtagcctgagtttaacggacactccttcctgaaatagaatggcatcagaaggagctaataatgagcagaaaaacccaacgttactctaaagagttcaaagccgaagctgtcagaacggttcttgaaaatcaactttcgatcagtgaaggcgcttcccgattatctcttcctgaaggcactttaggacaatgggttaccgccgccagaaaagggctcggtactcctggttcccgcacggtggctgaactggaatctgaaattctgcaactgcgtaaggcgttaaatgaagctcgccttgagcgagatatattaaaaaaagcaactgtagattcaatctgtcaatgcaacacccctttcaattatctctttcggtgttttgaacttcagtgtctttctcggtctgttgtttagctgagcagcaaccagatctagttcatgttgagtatattgggcaagacatgtctttttaggaaagtactgccgaattagcccatttgtgttctcatttgttccccgctgccaaggactctgaggatcgcagaagtaaactttaacgccggtgctgacagtaaattctagatgtctggccagttccattcctctgtcccatgtcagtgattttctgagttctgacggtaaactcaggaatttgtcggtaagagcctgatttactaagacagaatctttgcccctgagtctaaggatgatcgtataacgtgattttcggtctacaagtgtggctatatgagagtttttgtacctgagactaaatcgccctcccaatgccccagagagcgtctgttatcgatatttcgggaacgttcgtgaattggtgttccgttcactatgttaatcgtacctctttcgcctttgcgggtatgacgcctgccatggcgaaggctatgcgaccgtcgcagatgctgtatattcaggtggtgtagcgcttcacggctacgaaagtacagcgttttataaattgtctcaggtgatattcgcagcgttttttgacgtggttttgttcgccttaaccatcctgatatttgctctggagaccatttcatctccagcttttccagaacaagctttcgcaatggtaaattttgatccagtaagcacggttttggccttttcgccattctgttggctcggttattagcatcaacagctttgtaatagcgtctgccccgattacgctgaacttcacgtgagatcgtcgaaggactgcgattcagcgcagtagctatcgcacgaatgctcattttggctgacaaaccagctcgtatctcctcgcgctcagacagtgtcaggtgagctacagcccgcttacgctcatggggttttatgccgccagtatcccttaacatagtgaagatcgttccgggttttgaacccaggatattcgctatttcactgaagcctgttccgttcttccatagttcaaaaacagaggctttttcctctgctgtaaatgttcgtctcattcaaaaaacctccgcaaccccatgttttcacataactgttgcgttgaccaattgaatctacaacagcgtattttgcacaggagtcgctgaaaaatacgcgttaatcgaacaatggcgacaacaatttcccattgaagcgatgtgtcaggtatttggtgtatccaggagcggttattacaactgggtacagcatgaaccctcagacagaaaacaaagtgatgagcggctaaaactggagattaaggtggcacatatccgcactcgcgaaacatatggaacccggcggctccagacggagctggcagagaatggcatcatcgttggtcgtgaccgactggcacgtcttcgtaaggagctaaggctacgctgtaagcagaaacgcaagttcagagcgactacgaactcgaaccacaatctgccagttgcgccaaatctgctgaaccagacgttcgctcctacagcaccaaatcaggtctgggtggcggacctgacgtatgttgccacacaggagggatggttgtacctcgctggcatcaaagatgtttatacgtgcgaaattgtcggctacgccatgggagagcgcatgacaaaagagctgacaggtaaagccctgtttatggcgctcaggagccagcgcccacctgccgggctaatccaccactctgatcgaggttcacagtactgcgcatacgattaccgggtcatacaggagcagtttggtctgaaaacatcaatgtcgcgtaaaggtaactgttacgacaacgctccgatggaaagcttctggggaacgctgaaaaatgagagcctgagccactatcgttttaataaccgggatgaagccatctcagtaatacgggaatacattgagattttctacaatcgtcagcgtcgtcactctcgtctggggaatatctccccggcagccttcagggaaaaatatcatcagatggctgcttaaaaaaagaacaaatggtagtgtccgctattgccagtacacctcatatcgttacggcacattaccctgcccctcctggcacaataacatcaaccagcgactcttcaagccaacaccccaaatgcatttctttatgaattaatccgcaacaaacacacttcccatatagaaatatttgcaaaaaaagtgcatggaaaaagctttttctctaccaatccgggatataaatattcatcagcaccacaatattccacagcactaaatctctccccgccgccctgtacctctgataatggtctaaaatcattgaggccacttgcgacgacgttgctcaataaggaaaatttggcgtgaataatattcaacaccagtacagcatcatcattacatacttacacccgccgactaccgctttcgatatattgactcaattttccagcctggttaaaaatagcgaccagctcagtcgcaaatatagtgactaccctaactaggtaatgactccaacttattgatagtgttttatgttcagataatgcccgatgactttgtcatgcagctccaccgattttgagaacgacagcgacttccgtcccagccgtgccaggtgctgcctcagattcaggttatgccgctcaattcgctgcgtatatcgcttgctgattacgtgcagctttcccttcaggcgggattcatacagcggccagccatccgtcatccatatcaccacgtcaaagggtgacagcaggctcataagacgccccagcgtcgccatagtgcgttcaccgatacgtgcgcaacaaccgtcttccggagcctgtcatacgcgtaaaacagccagcgctggcgcgatttagccccgacatagccccactgttcgtccatttccgcgcagacgatgacgtcactgccyggctgtatgcgcgaggttaccgactgcggcctgagttttttaagtgacgtaaaatcgtgttgaggccaacgcccataatgcgggcagttgcccggcatccaacgccattcatggccatatcaatgattttctggtgcgtaccgggttgagaagcggtgtaagtgactgcagttgccatgttttacggcagtgagagcagagatagcgctgatgtccggcggtgcttttgccgttacgcaccaccccgtcagtagctgaacaggagggacagctgatagaaacagaagccactggagcacctcaaaaacaccatcatacactaaatcagtaagttggcagcatcaccccctaactaagcaacaataaggaatacactatgactgttcaaacaagtaaaaatccgcaggtcgatattgctgaagataatgcattcttcccttcagaatattcgcttagccaatataccagtcctgtctctgatcttgatggcgtggactatccaaaaccttatcgcggtaaacataaaattctggtgatcgccgcggacgaacgttatttgccgaccgataacggaaaactgttctcgaccggtaaccatccgattgaaacgttgctgccgttgtatcatctccatgctgcaggtttcgaattcgaagtggcgaccatttccggtctgatgaccaagtttgaatactgggctatgccgcacaaagatgaaaaagtaatgccattctttgagcagcataaatcgttgttccgcaatccgaagaaactcgcggatgttgtcgccagcctcaacgctgatagcgaatatgcagcaatctttgttcctggtggtcatggcacacttattggtttacctgaaagccaggacgtagctgccgctttacagtgggcaatcaaaaatgaccgttttgttatctccctttgccacggcccggcggcttttctggcgcttcgccacggcgataacccactgaatggttattccatttgcgcattcccagacgccgcagacaaacaaacgccagagattggctatatgccgggtcatctcacctggtacttcggcgaagaactgaagaaaatgggcatgaacatcattaatgacgacatcaccgggcgagtacataaggaccgtaaacttctcaccggcgacagtccttttgcagcgaatgcgttgggtaaactggcggcgcaggaaatgctggcagcttacgcgggttaatccctgttacgtttgaatgtaagcgcataatcaatcgcagccgcgttagtactcacgacgtggctgcgttttttcacgggcgtactgaagccctatgttaatttctttgcggtaacgtaatccggaacacattatgcttattgagatagtgatacgtagcacttcccccatgtaattcggcaatcgctttgactaaagaaagaccaagtccctgacctacggaatgacgcgaattatctccccgccaaaatctacggaagagtttttcaggctcattaattttcgttccagggctggcgatatcaatattaagatagctgttggtatcaagaaaactggttatatgaatacgcgatttttctggcgaatatcgaatagcgttaacaataagattcgataacattcgttgcagtaaaattttatccgcaaagatttgctgattgcactcgacattaaagcaaatctctttctcgtctgaaagatattcaagatagtccaacaaattttcgacttccttattgagagaaagcgagtccagtttcaccaaaacattgtttttatctgccctggcaagaaacagtatgttctctgttaaccgcgaaatattttccagctcttcaatgtttccggcaattgttttttgatattcagcgatacttctggtttgactgagcgtaacctgattctgacccagtaatgcattaattggcgttctaagttcatgagcgagatcgtcagcaaactgacttagacgctcaaaatctttgactaaagcatgatgcattttattcaacgcctgcccaagaggttttagttctctcggtaatgcactaacctcaacaggctcccggctatcgttataattcagcgcttccgttacaccactcaactttttgatctctcgtaaccccgttcggattaacagcggacttaatactgagcacagtataatggcgacaatgcaaattataatgctattgattttatactgttcaagcatgttatgtctggctgaagccaatttagccacagtaaccgttaatgatggcgaaacttcatcaatattaattcgtaaagcatctatctctgtgtcattaataatgcttctgtaaatgccagctgcgctgattgtctcactagcaggtatgttatttaacatgccatcactgacatttgtccggttaacaattttattgatgctatcaccatgaatgatcaagatatcctgactaacatccatcatccggttaaagtacacaggtaacgtatctggatttaccccatcaattaacaactgcttgatctgtgctgtccggttaatgagtgttgtatcatcgcgccatttcaactcacttgccaggccattatagagagtccagacaattccagcgccagcaacagacagcagcaatataaaaagcaaggttaaacggacggttatagataatcttttcattatttttttaccgctacgaatgaatagcccatcccccggattgtggcgattagcttttcaggaaaaggatcatcaacttttgcgcggagcctgcgaatggcgacgtccaccgtattggtatcactatcaaagttgattccccaaatttcactcgcaataaccgttctggggataatctcgccagctctggaggccagtagccaaagtaactgaaactccttgcgcgtcagtgtaatactgatattgtccctgctcacactttgactaacagagtccattcttaagccactgatttctaatgttgaattcagagtgtgatgttgccttaattgtgcccgaacccttgccagcaactcagaaaatgaaaaaggttttaccagataatcatttgccccactgtccagccctctgactctgtcatcgacagaatctcttgcagtaaggcaaataaccggagtttgctttgctgttcttaacgtttgtaagatctgccagccatccatacccggaagcataatatccagaatgatcaatgcataatcatccttaagcgcaagataaagcccatctctgccatcagaaacggcatcaatgacataacccgcttcggaaagcccctgcgttacccactcctgggtcctttgattatcttcaataagtaaaatcttcatgaaaataatatgccataaatcatatgttatagaaacagcctggttcattacaaaattgtaatgctgctgtaaggttaccgtggacgctttttcgctatcctcaaaactcattcacatgacaaggatataaacatgttaaagcgttatttagtactctccgtagtaacggctgcattttcattaccttctttggtctatgctgcacaacaaaacattcttagtgtgcacattttgaaccagcaaacaggaaaacccgctgccgacgtgacagtcactcttgaaaagaaagcggacaacggctggttacaacttaataccgccaaaacagataaggatggacgaattaaggcactgtggcccgagcaaactgcaactacgggcgattaccgtgtcgtatttaaaaccggggactatttcaagaaacaaaatcttgaaagtttcttccctgagatccccgttgaatttcatattaataaagtgaacgagcattatcatgtgcctttattacttagccaatatgggtattcaacctatcgtggcagttaatgcataaatatgtaaaagcagatctctgctactgttagggaggacactccctgacagattaacagtaaacggctcttgctggctaacgacaaaaaagtgtgatggcttatgaaaaagaatcaatttttaaaagaatcagatgttacggccgagtcggtattctttatgacgcgtcggcaggtgttaaaagcactgggcatcagcgcggctgcactttctttgcctcacgctgcgcatgccgatctgcttagctggtttaaagggaatgatcgcccacccgcccccgccggaaaaccgttggagttcagcaagcctgccgcctggcaaaatgacctgccactgacgccagcagataaagtctccggttataacaacttctatgaattcgggctggataaagccgatcccgccgctaatgctggtagcctgaaaaccgatccatggacactgaaaatcagcggcgaagtggcaaaaccattgaccctcgatcacgatgatttaacccgtcgctttccgctggaagagcgtatttatcgtatgcgctgcgtggaagcatggtcgatggtggtgccgtggattggttttccgctgcacaaattgctggcgcttgccgaacccaccagcaatgcgaagtatgtcgctttcgaaacaatttatgcaccggaacaaatgccaggccagcaggaccgctttatcggtggcgggctgaaatatccttatgtcgaaggattgcgtctcgacgaagcaatgcatccgctcacactgatgaccgtgggtgtttatggcaaggcgttaccgccacaaaatggcgcgccggtgcgactgattgtgccgtggaaatatggctttaaagggattaaatcgatagtcagtattaagctgacccgcgagcgtccgccaaccacctggaatctggcagcgcctgacgaatacggtttttacgccaacgttaatccgcatgttgatcacccgcgctggtcacaggctaccgaacgatttattggttcaggcggcatcctcgatgtacagcgccagccaacgctactgtttaatggttacgccgagcaggtggcatcgctgtatcgtggcctggatttgcgggagaatttctaaatgcgtctgacagcaaaacaggtgacatggctgaaagtttgcctgcatcttgccggattgttgccgtttctctggctggtctgggcgattaatcacggtggattgggtgccgatccggtgaaagatattcagcattttactggtcgcactgcactgaaatttttgctggcgaccttgttaatcacacctctggcacgctacgcaaaacagccgttattgatacgcactcgccgcctgttaggcttatggtgctttgcctgggcgacactgcatttaaccagttacgcattgctggagctgggcgtgaataatctggcgttattaggtaaggagttaattacccggccttatttaacgttaggtattatcagctgggtaattttgcttgcgttagcgttcacttcaacccaggcgatgcagcgaaaactcggtaaacactggcaacagttgcataacttcgtctatcttgtcgcgatcctggccccaatacattatttgtggtcagtgaagattatttcaccgcagccactcatctacgctgggctggcggtactgcttttagccttacggtataagaagttgctttccctttttaaccgtttacgcaagcaggttcacaacaaattatctgtataacttcatattgccgacaaagtacgcgttatccctgccggatgcggcgcgagcgccctatccggcctacgcagatcacatcaagttatgtttcgtttgtcatcaacctcaaatcatcgacataatttattttatttcaataagatagataagcacacctgagagaactattctcttgtctcctaagagttgttgcattttgttatatgttacaatataacattacacatcatatacattaactctggaggaaactgttttggcgattcgtcttcataaactggctgttgctttaggtgtctttattgttagcgctcctgccttttcgcatggtcatcactcacacggcaaacccttaacagaggtcgaacaaaaagctgctaatggtgtttttgatgatgccaatgtacaaaaccgaacgctcagtgactgggatggagtctggcaatccgtttatcctttactgcaaagtggcaaacttgaccccgtctttcagaagaaagcggatgcagataaaaccaaaacatttgctgaaattaaagattattatcgcaaaggttatgtgacagacatcgagatgattggcattgaggacggcattgtcgaattccatagaaataatgaaacaacatcctgtaaatatgattacgatggatacaaaatactcacctataaatcaggcaagaaaggcgttcgttacttattcgaatgtaaagatcctgaaagcaaagcccctaaatatatacaatttagcgatcatataattgcaccacgaaaatcatctcattttcacatttttatgggtaatgattcccaacagtctttattgaatgaaatggaaaactggccaacgtattatccctatcagttgagtagcgaagaagtggtcgaggagatgatgtctcattgatttttttgcgctgacttcagttatttaacagaacagtgcctggtagtaacaacaataatttgccaagacaaataagtaagacaaactcagacacgctcatacttgagtcgtgtcttttttattatgtctgtagaaaaaaaatgcgaaaaaggcgaacaataaatacacaactcagccatacagactggcagcacaaatgtttccaggagcaagtcatctgtcatggtaaagctaaccagaaatataggttaattttggtgtttaaaccttttttacttgttagtatgatacaaaggctttcaaaaaagctgggaaattcaacaactcttggaaattatggactttgtcccgcggctttaatctgacggccgcgttccttttttgactcaattattgaccccttctctacgcaacttcagttcccgccagcaactttgcggcagtttcataggatcaatgtctaaaagaataatggtgaccgataagaaaacgactgaataactgtagattttcgctcgaaaccttcctgtcagctccatagcgaatcaagtgctgaatgtcacagtatcgaacagaaaacagtgacgatctaacccttcaagaatattctacgattgttctgtttaggaaaagcaaggcgggaagtcaggagataagtcattgataaagtggcggagagagggggatttgaacccccggtagagttgcccctactccggttttcgagaccggtccgttcagccgctccggcatctctccgttcagatggttgccatgatgtcaggaaatttggcattttaacagtccctgtccgtgcaattttgttcaagtgacgagtttgcgagcaaaacgatgattaagtggccctggaaagtacaagaatcagcacatcaaactgcccttccctggcaggaagcactatcgatcccccttttaacgggtctgacggaacaggaacaaagcaaattagtcactcttgccgaacgttttttacagcaaaagcggcttgttcctttacagggctttgaactggattcattaagaagctgccggatagcacttctattttgcctacccgttctggagttaggactggaatggctggatggttttcatgaagtcttaatttatcctgcgccatttgtggtcgatgatgaatgggaagacgatatcggtctggtgcataaccaacgtattgttcagtcaggtcagagctggcagcaagggcctatcgttttgaactggttggatatacaagattcttttgatgcatctggttttaacctgattattcatgaagtcgctcataagctggacacccgtaacggcgatcgcgccagcggagttccctttatttcgttgcgtgaggttgctggctgggaacacgatcttcatgctgcaatgaacaacattcaggaagaaatcgaattagttggtgagaatgcggcgagcattgatgcttatgctgccagtgatcctgctgaatgttttgccgtactttctgaatatttctttagcgccccagaactttttgctcctcgtttcccttcattgtggcaacgtttctgtcaattttatcaacaagatcctttgcagagactgcatcacgctaatgatacagactcgttttcggcgacgaatgttcattaattaacaactttgcagattaattaaccaattgaaatggcttatgaaatttagtgttgacagacaaggtaccgctaagtaatatgcgctccgttcacacgattcctctgtagttcagtcggtagaacggcggactgttaatccgtatgtcactggttcgagtccagtcagaggagccaattttctgttttcatgcatccttgcaaatctttatctgatgttgattcaacaggttagtgtgaaaactcttctcggtgcattttgattttaccctacgcatcgggaaaaattggtggtcaaatctggggtcaggttagttcgataatggagtgccccccatatgttccttaccgacgcaaaaatccgcaccctcaagccttctgataaaccatttaaagtctccgattctcacggtctgtatctgctggtcaagccgggtggctcccgccactggtatctcaaataccgtattagcggtaaagaatcccgcattgcgctgggtgcctatcaagccatctccctgtctgatgcgcgacagcaacgtgaaggtatccgtaaaatgctggcgctgaatatcaacccggtacagcagcgggctgctgaacgtggctcacgaacaccggagaaagtttttaaaaacttggcgctggcgtggcataaaagtaacaggaaatggtcgcagaacaccgccgaccgtctgcttgccagcctgaacaatcacatctttccggtcatcgggaacctacctgtatcagaacttaaaccccgtcatttcattgacctgctgaaagggatcgaggaaaaaggtctgctggaggttgcgtcccgcacacggcagcacctgagtaacataatgcgccatgcggtccatcaggagttaatcgatacgaaccctgcagcaaaccttggcggcgtgaccacacctcctgtcagacggcactatcctgccctgccgctggagcggctgcctgaactgcttgaacgtattggggcatatcatcagggccgtgaactgacccggcatgccgttctgctgatgctgcatgtgttcattcgctccagtgaactgcgtttcgcccgctggtcagagattgatttcacaaaccgagtctggacgatacccgcgacgcgagaacccattattggcgtgcgttattccggccgcggggcaaaaatgcgaatgccgcatatcgtccccctctcagaacagtccatcgccattctgaaacagattaaggatatcaccggtaataatgaactgatcttccccggcgaccataacccgtataagccaatgtgtgaaaacacggtcaataaggcactgcgggtgatgggttacgacacgaaaaaggatatctgcggtcacggcttccgggcaatggcatgcagtgcgctgatggaatcgggtttatgggcaaaggacgcagtagaacgccagatgagtcatcaggagcgcaataccgtgcgcatggcttatattcataaggcagagcacctagaagcccgcaaagcgatgatgcagtggtggtcggattatctggaagcatgccgagaatcttatgcaccgccttatacaattggtaaaaataagtttatcccatagtatactaacgaatccctcactctggcaaattaccaccacctccacaggaggtggttctatatagacttttatcaacttcatgacgaaaaacacctattttatcccaaaagaagacaatagagtcacagaggaatcaaagagcgactcaattgtctttggacagtctggttgtgaggttagaaaacagttactcctacaccattaaatagggcgcaatgctcgctaatttctcccgggtttctgtcagttcgcgttccggagtagattgcgcgatgattcccgccccgcctgtatccagctgcgctggctatcctgaaatacggaacgcagaactagcgccgcatcaaagcgcgtatcgtccagcagcaggattgcgccggaataaagctctcgcggcgtcttctcaatttgcataatcgcgttcagagcagcatttttagggatacctgaggcggtaatcgacggaaacagcacggtaaacgcatcccaggcatccttgttttccgaaagctgaccgctcacgccagaccccagatgctgaacgctgccgcgctggcgaaccgacattaaatcttcaaccaccacgctgcccggctggcaaacagcctccagttcagcaatagcttctttgacagaaaggatatgctcaagcacctctttactgtcgtgcagcagttctgcctctttcgccttattatgctccgggtttcccatgcgatcgcgggtgcccgcaagcggttcagtgaccactttattgcccgtcactgacatcaccagttccgggctaaagcccagcgcttcgcgtccttcctgacggaacataaacgagcgcacaggcgtgtttgcctgccgcccgtataacagcgtggcgggcatatcaatccgcgatggcaggggaatggcgcgcgagacaatcactttgacatactcgccacggcggatctccgcaacggcgcgcgcaacctgttgtttatatgcctcaccattgagggcggtatccaccgccagtggtgcgttctgcgtcgttgtaccggcctcttttacccactcgcacaaacgtcggcacccgtcggcggagtccgcataaacggtgacatttcccttttcaaaaataagttcttcacggggaacggttaacgtcagcagcggccactccccggcgttaaaggcaatcccccgcgcatgcgccgcaaagttgaacccaacctgtccatatacccgacgtcctttcacctgaggatgcgccataaaacgacgcgcgcagtcggcaatggaatccaccgcccatttttgctccccggcatcatcaataaatgtcgcctgcgttccgtcggcattaatgtgcagccgtgcctggcaccctttgcctaaataccaacagggttgacgctcatagacataacactcttcttctgcgaactggcgtaaaacgccagaaatcgtcggtagccattgttcctctggtaacgccagatgtaaaaattcactgattttcatcccttacctctctgtgttattcccggatcaatcaattgcgcttgtcatcagttctcttgccgaatgcagccggatataagcaacccacgccgccagcaacgtgaatgccccggcaaacaggaagcaggccgcatagccaaaatgttgagcaacaacgccaccgataacgcctgccagaatggcgattgccgcatcagtacattgaaagagggtgaagtcgacaccggcctgcaaaggcgatgaaagcgacatcagcgtggcgtaaagacagaccagcgcgcaggccagcgaaatggactggacaaggaccagacactggagaatctgcagcagcagatgacccggcgccatcatgagagtcatcaccaccgccagcagcgcgatcccctggacgccataagccgtcaacagcgctctgccgggtgaggtgtatttcatcagcaatccgccggccagcgttcctgctatgcccgctgcaatattgccgccgctgaacagcgcgcccaatgcggacatgctcaacccatgatccaacaacagcggtgccagaagaggcagcacaaaccgcatgcctgaattcagcatcaataccagcagtaagcccaggcgagcctgcttcctccttagcgcataacctaacgccggaacatgcgggatagtcgctgttcgcgtcggctccgtaatgcgccacagcgggagtgacagcgccataatcagcaccgccatcatcagcatggcgacaggccagccggatgccgccgacagcatcaggaacaccccgccgccgcacatcattcccagatagctgccgccgacctgcacgctgtttccccagccgtaacccgtgcgggtcagttgatcgacacaaaagccgtcgctggcgatatcaatggtggaggcgaccgtgcctgccaccataaacagaacaaataacgcgacgatttgcgtatcggggaatcccccttctcgcccaaaccagccaatcgctgcgacaatagtcaggatcgccgctagcgcgacctgaccacgcaggattaacatgcgggaacggcgttcctggctaccgggcggaagccgccagcgctcgatccacgacgcccaaataaacttcagcgcccagggcagcataaacagggttgtcgcaccggcaagcgccagcgaaccgccagcagcgcgcaccagcgcgggtaaggactgcatagacagcgccgataccagactctgcgtcacatagacgccggcaatagcaaaaatcacccgcccggtcgtcaacgtcagcggtttcacattcgactgaacatcactcatgcacccactctccagacgcggaaaccccgtcgtcgcgccacacgcgcgcggccatttgcgcctgccacagcgcctgataacgtccatgatgtgagagcaattgcgcatgagtaccctgctcaaccacctgtccctcttccatcaccagaatgtttccggccccggcgatggtggataaacggtgagcgatgataatcaccgtccggttgtgaaccaggttatcgatcgctttttgcaccgccagctcgctttcaatatccagcgcggcagtcggttcatcgagaatgacgaccggcgcgtttttcaataacgctctggcaatggaaatccgctggcgctcgccgcccgatagctggccgcccatctctcccattggcgtcagccagccttgcggaagacgggaaataaactcaaggcactgcgccgcgcgggcggcctcttctacctcctgccgcgtcgcctgtgggcgcgcgatacggatattcgccagcagcgtgtcatcaaacagccagacatcctggaaaacaacagaaatcaggctattgagctgttccggcgtcaggcggcgaatatcgacgccgccaatagaaatctgcccttgctgcggatcggcatagcgcattaacagtttggtgaccgtagttttgcctgcgccggaggcacccaccagcgcgctcatactggctgccgggaacgtcaaagaaacatgattaagcgcgtagccgtcgccttcttcgtagcgatagctgacgttgtcaaagcggatatcgtaacgttccggcatctcgctttgctctgcgacgggaagcggtgctatcgccataaactgctcaatccgttgcagggcgctggcgatcagttccacaaccgaggtgtagctgataaacatcgccatcggttctgcgaagcgcataatcatcgcgacggcggcaatcaaaaaggcgaggttcagagtgcccgtcactacccagacgatcccggataacaccaccacctgtaggcccaactccacgacgctggcgatcagcatcgttgcgccagcgccctgacggtgagtgcgggtctgtaagttttccagcgcattgaaatgcgccagcagcgcccggcttttatcggcatcgctgccgcaggtgcgcaataccatcatcccctgagcaaattcaacgatatcgccgctcagacgctggtgcgcttcccccagcgtctgcatttgtcgccgcatcgccgggcggcgccagtaataaaacggcaccagcagagggaagatcagcaacatcaccagccccagccgccagtctatccacaatgtcgccagcgacgccgtcagcggcgtgacaatggtgagcagcaaaatattggctatcgcaataacataattgaggttttcatccacgctgcccagcagcaaggcgttcatttcacccgccctgccgcgctggagcttctccagcggcacgcggcgtaactgctcgccaagtcgcaggcgcaactcatgggtagcctgcgccagatgaccacggtattcaaagcccaggccataccagcgtagcaccagcgtcacaattgcggcgacgctgaaggccatagcccagttaagaagttgcggcgcgtctccccgtaacagcgcatcaatgatcggataaagacaggcaaaggcgatcccctgcatgaatgccgccagcaacagcgccagcatactgcgtcgcagcatcctggcctgactgccaacgctggagataagctggcgccagatgacgcgccaggccaggttatccgcaggattattgtctttcattttccaccacctcttcctgtgttccacccggcacccaatgctgcgcctgctgatagtgttgccagagccgttgatacaggccgccctgcgccaacagttgcgtatggttccccatttccctgagctgtccgtcggaaaacagcaatatcacatcggcctgagtcaccattgagagacgatgcgcgaccatgatgaccgtccggccacgcatggccgccgcgagcgccttgataagcgccgcttcgttttccgggtcagcaaacgccgtcgcctcatcgagcaccaggatggggcgatcctgcaaaagcgcccgggcgatagtaatgcgctgccgctggccgccggagagaaataccccacgttccccgactcgagtgttgtaaccttctggcagagcgctaataaaatcatgggcctgcgccactctggccgccgctataaccgcctccagcggcgtatccggcgcgcccagacgaatgttattggctatcgtgtcggcaaaaaggaagttgtcctgaaacacaaacgagagttgcttcatcagggtgtccgtctgcatatcacgcagatccacgccgccaatacggatatggcctttgtccgggtcggcgtaacgcagcagcaagcgcgccacggtgctttttccggcgccgcttggcccgaccagcgccacaatttgcccggcaggcacatgaaagctcacctcctgcaacgcggcgccagtacgcgcttgcggataatgaaagctcacctgctcaaaggtaatgctcgcctcttgcggctgctggtcagactgcggcagcgataactccggcatcgcgagaacctgataaatacgctgaatgcttaaacgcgtttgcgcgaccaggttattgagcatcatcattggcattacggcttcggccattccgctgcccagcagtaaaacggccacccacgcgataaaatcgaaactgccatagtgcaacaggccgtatcccgaccagatcaggacaaacagggtcgggagaggattcagaatcgagaaggaaaaacgcgctgaaaaaccggctttgcgataccaggttttgagcacatcgacccactcttcaagggcgcgttgatagcgcaaaaaactggtgctgccgctatcaaacgttctcaccacgggcatggcctgcacgaactcaataaccgccgcgctaacctgctcgcgcgccttatgataacgctgagccatattttccgaacgctggcgggcgagcacgagaataaccgatccaaacgccagtacccccagcgtcgcgattgccagccgccagtccagccagaacaagataacgattgtcgccagcggcatgatgatcgcgcgggcatagagcggcgtgctgtcggccacaaaaatatgtaacgacttcacgtcatccagcatcactttcgccactgacccgcagcccatttgctgtaacacgccaggcggaagctgcaatgctttacgggctaacctgctgcgcagaatgttctccagatgaaaagccgcgtaatgagaggtgttgaacgcctgtaagcgcagaacaaaagttaagaccacgcagccgatcacgccgcccagcggccaggccggaatagcgtcaggcgtcgcgcgaatgtcacgcaggctccacgccagaaaaaggagcgcccccaggctggttaatgccgccagccccgccagcgccatagctaaaataaccttcctgcgaaccggtgtaatcacctgccagagaggaaatcgggacagcgattcagtactggatgattgagatgacatgggagtaactgaatttcctgatgaatttttacggacgccaaaaacgacaattcagggtggcgttctgagaattaatgtgaataataaccattatcaataactcatctaccccattcggttctatttatacccgcattggtctaagccacagggagataaccaggtcatgacggagtcaccgcaaacgcaatctgaaatctctattcaccagttggtggtcgggaaacctgcaaacgatggcaatattcctgctcagtgtgaactgctgcgctgttcgttgcaggaaggtatggatattttgctctggaggggccattttgcgcggccagagacgttgcagctacacgacgatctgggcaggattaacttctcgtgcatcctggaaggcacatcgcgctttgcgattcagggactccggcgccacaccgactgggagcttgcgcgcaatcgccattacattacccatacgccagactgtcgcggcagcgcctcctattgtggccgattcgagagcattaccctctccttcagccctgaaaccctcgcgctgtgggtgccggatattagcgcggtcattaagaataagatcgactcccactgctgttgccagcagcagcgttgtaatgctgaaacccacttaacggctcaggccttgcgtcacgcgctgatgcgcatgcacggcggcttcagtcatgaacaaaagccgtcgacgctatggttgcaggggcaaagtctggtcatgctcagtctggtgctggatgaacatcgcgaagacgccagttgcctctcctgccacttcaacccgatggaacgccagaaactgctgcgggcgaaggatctgctgctggctgatctgacgcaagcgccgggcgtcgcggagctggccagagagtccggtctgagcgttctcaaaattaagcgaggcttccgcgttctgttcaacaacagcgtctatggcctgtttcaggctgaacgaatgcaggaagccagaagacgcctggccaacggcaatacctccgtcatgacggtggcggccgatctgggctatgccaacgccagccatttctctgccgccttccagaaacagtttggcgtaactccttcgacctttaaacgcgggatgtaaccggggtcgcgcccccctaaactcctccctgacagaggcccggataccccatccgggcctctgttctttccgcctgttaccaacccgaaacgggcataaataaacccgtttcgggtagcatccaattgttaataattattattctcatatgagtaatgcttttcggtaagacgtgccatcaggaggaagaatgatttctggcgcaccatttcaggattcgctgttaccggacaaccgccacgcggctgattaccaacaattacgcgagcggctcatacaggaactgaatttaacgccgcagcagttacatgaagagagcaacctgatccaggccggcctggattccataagattgatgagatggttacactggtttcgtaaaaatggctaccgccttacccttcgcgagctgtatgccgcccccacgctggcggcatggaaccagttaatgctcagccggtcgccggagaacgcggaagaagaaacgccgcccgacgaatcatcctggccgaacatgaccgaaagtacccccttcccattgacgccagtacagcacgcctacctgacgggccgcatgccggggcagacgcttggcggcgtgggttgccacctgtatcaggagtttgaaggccattgtctgacggcgtcgcagctggagcaggccatcacgaccttgctgcaacgccacccaatgctgcatatcgcctttcgccccgacgggcagcaggtctggctaccgcaaccttactggaacggcgtcaccgttcatgatttacgccataacgacgctgaaagccgccaggcctatctggacgcactgcgccagcgcctgagccaccgtcttttacgcgtggaaatcggcgaaacgtttgattttcagctgacgctcttgccggacaatcgccaccgcctccatgtcaatattgacctgctgattatggatgcctccagctttacgcttttcttcgatgagcttaacgccctgctggccggagaatcgctgccggctatcgacacccgctatgatttccgctcgtatttgctgcaccagcagaagatcaatcaaccactgagagacgtcgcgcgcgcttactggctggcgaaagcatcgacgcttccccccgcgcccgtcttgccgctggcctgcgaacccgccacgctacgtgaagtccgtaatacccgacgccgcatgattgtcccggcaacacgctggcacgcctttagcaaccgggccggcgagtatggcgtgacgccgacaatggcactggcgacctgtttttctgccgtgctggctcgctggggcggcctgacgcgtctgctgcttaacatcaccttattcgaccgccagccgctgcaaccggcggttggcgcgatgcttgccgacttcaccaatattcttctgctggataccgcctgcgatggcgataccgtcagcaacctggcgcgtaaaaaccagctcacgtttacggaggactgggagcatcgccactggtccggcgtcgaattactccgtgaactcaaacgccagcagcgctacccccacggcgccccggtggtatttaccagcaatctggggcgttccctctacagcagccgcgcagaatcgccgttgggcgagccggaatggggcatctcgcaaacgccgcaggtctggatagatcatctggcgttcgagcatcacggcgaggtctggctacaatgggacagcaacgacgcgctgttccctccggcgttagtcgaaacattgttcgacgcctactgccagttgattaaccaactctgcgatgacgaaagcgcctggcaaaagccgttcgcagatatgatgcccgccagccagcgcgcgatacgcgaacgggtcaacgccaccggcgcccccattcccgaaggcttgctgcatgaaggcattttccgtatcgctctgcaacagccgcaggcgctggcggtaacggacatgcgttatcagtggaattatcatgagctgacagactatgcccgccgttgcgcgggcaggttaatcgagtgcggggttcagcccggcgataatgtggctatcacgatgtcgaaaggcgcaggacaacttgttgcggttctggccgtcctgctggccggggcggtttacgttccggtttcgctggatcagcctgccgcacggcgcgagaaaatctacgctgacgccagcgtccggctggtgctcatttgtcagcacgacgccagcgccgggtcagacgatattcccgcccttgcctggcagcaggccattgaggcggagccgatcgccaacccggtagtacgcgcccccacgcaaccggcctacattatctacacctccggctctaccggtacgccgaaaggggtagtcatttctcaccggggagcgcttaacacctgttgcgatatcaatacccgctatcaggttggcccgcatgacagggtgctggccctctccgccctacattttgatttatcggtttacgacatttttggcgtactgcgcgcgggcggcgcgctggtgatggtgatggaaaatcaacggcgcgatcctcacgcatggtgtgagctgatccagcgccatcaggtcacgctctggaacagcgtcccggcgctgttcgatatgctgctgacctggtgtgaaggtttcgccgacgccacgccggaaaacctgcgcgcagtgatgctttccggcgactggatcgggcttgacctccccgcccgttatcgggccttccggccacaaggacaatttatcgcgatgggcggcgccaccgaggcgtctatctggtctaacgcctgcgaaattcacgacgtccccgcccactggcgctccatcccttacggttttccgctaaccaaccaacgctaccgggtggtggatgaacagggccgggactgccctgactgggtgccgggtgaattatggattggcggcattggggtcgcggaaggctatttcaacgatcccctgcgtagcgagcagcaatttttgacgctcccggacgagcgctggtatcgcaccggcgatctcggctgctactggccagatggcacaatcgagttcctcggtcgtcgcgacaagcaggtcaaagtcggaggatatcgcatcgagctgggcgaaatcgaaagcgcgctcagccagctggtgggggtgaaacaagcaaccgttctggcgatcggcgaaaaagaaaaaacgctggcggcatacgttgttcctcagggcgaggctttttgcgttaccgatcatcggaacccggcactgccgcaggcgtggcacacgcttgcgggaacgttgccctgttgcgccatctcgccagagatctccgcagaacaggtagccgatttccttcagcatcgcctgctaaaactgaagccgggtcacaccgctggcgccgatcctctccccctgatgaactcactcgctatccagccgcgctggcaggccgtggtggaacgctggttagcatttctggtgacacaacggcgactgaagcccgctgctgaaggttatcaggtctgcgctggtgaagaacgcgaggatgagcacccgcacttcagcggacatgatttaacgttatcgcaaattcttcgcggtgcccgtaacgaactgtcgttactgaacgacgcgcagtggtcgccggaaagcctggcctttaaccatccggccagtgccccgtatattcaggaactggcgacaatttgccaacagcttgcacagcgcttacagcgcccggtacgcctgcttgaggtgggaacccgcactggccgcaccgcagaatcgctgttagcacagctcaacgccggacagattgagtatgtcgggcttgagcagagccaggagatgctgctgagcgcccggcagaggctcgccccctggcctggcgcccgtctgtccctctggaatgcagacacgctggcggcgcacgctcactcggcggacattatctggcttaataacgccctgcatcgtctgctgccggaagatcccgggctccttgcgacattacaacagcttgccgttcccggcgcgctgctctacgtgatggagtttcgccagttaacgccgtccgccctactcagcacgctcctgttaaccaatgggcagccggaggccttgctgcataacagcgccgactgggcggcattatttagcgcggccggcttcaactgtcagcatggcgatgaggtcgcggggttacaacgcttcctcgtacaatgtcctgacaggcaggtgcgccgcgatccccgtcaacttcaggccgccctcgccgggcgtctgccggggtggatggtgccgcaacggatcgtcttcctcgacgccttaccgctgacagctaacgggaaaattgactaccaggcgctgaagcgtcgtcatacccctgaagcggaaaacccggccgaagcggatttaccccagggcgacattgaaaaacaggttgccgccctctggcagcaactcttatcaactggcaatgtcaccagagaaaccgacttcttccagcaaggcggcgatagcctgctggcgacccgtctgaccgggcaacttcatcaggcaggttatgaagcgcaattaagcgacctgtttaatcatccccggctggcggattttgccgccacgctgcggaaaaccgacgtcccggtcgaacaaccattcgtccactcccttgaagatcgctaccagccctttgcgcttaccgacgtgcagcaggcttacctggtggggcgtcagccgggctttgccctgggcggcgtcggctcacatttctttgttgaatttgaaattgccgatctggacctcacccggctggagacggtctggaaccgattaatcgcccgccacgatatgctgcgcgccatcgtgcgtgatggacagcaacaggtgctcgaacagacgcccccctgggtgatacccgcacacaccctccatacgcctgaagaggcgttgcgggtgcgcgaaaaactggcgcatcaggtactcaaccccgaagtgtggccggtattcgatctccaggtcggatacgtggacgggatgcctgcccgcctgtggctgtgtctggataacctgttgcttgacggtctgagcatgcagatcctgctggcggagctggagcacggctaccgctacccgcaacagctgcttccgccgctgcccgtcaccttcagggattatctgcaacaaccctcgctacagtcgcccaatccagattctctggcatggtggcaggcgcagcttgatgatattcctccggcgcctgcgttgccgctgcgctgcttgcctcaggaggttgaaacaccgcgcttcgcccgcctgaacggcgcactggacagcacgcgctggcatcggctgaaaaaacgggcggctgacgcccatctcaccccgtcggccgtactgttgtcggtgtggtcaacggttctctctgcatggagtgcgcagcctgacttcacgcttaaccttacgcttttcgacaggcgaccgctgcacccgcaaatcaaccagattctgggcgatttcacctcgctgatgctgctgagctggcatcccggcgaaagctggctgcacagcgcgcagtcactacagcagcggctgagccagaacctcaaccaccgcgatgtgtcagccatccgcgtgatgcgtcaactggcgcaacggcaaaacgtgccagccgttccgatgcccgtcgtctttaccagcgcgctgggctttgagcaggataacttcctcgcccggcgtaatctgctcaaaccggtctggggcatctcccagacgccgcaggtctggctcgatcaccagatttatgaatccgaaggcgaactgcgctttaactgggattttgtcgccgcgctgtttcctgccgggcaggtggagcgccagtttgaacagtattgcgcattgctaaaccgaatggccgaggatgaaagcggctggcaactgccgctcgccgcgctggtgcctcccgttaaacacgcagggcaatgcgcagagcgctcaccgcgcgtatgccctgagcactctcagccacacattgcggcggacgagagcaccgtcagcctgatttgcgacgccttccgcgaggtggttggcgagtctgtcacgcccgcagaaaacttctttgaggcgggcgcaacgtcgctgaatctggtgcaactgcacgttttgttacaacgtcacgaattttccaccctgacgttgcttgacctcttcacccacccttctcctgctgccctggccgattatctggccggcgtcgccacggtggagaaaacacaacgacctcgccctgttcgccgtcgtcagcggcggatatagcgcgaagcaaactgatttttcccggaacgccatcgcgaacgcatggcgttccattgactttgtgaatcttaggaaacgggaccgattatggataacttgcgcttctcttctgcgccgacagcagattccattgatgcatcgatcgctcaacactacccggactgcgaacctgtcgcggttatcggctacgcctgccattttcctgaatcgccggatggcgaaacgttctggcaaaatctgctggaaggtcgtgaatgcagccgacgctttacgcgcgaagagcttctggccgtcggtctggatgccgccatcattgacgatcctcattatgtcaatatcggtacggtgttagacaacgccgactgcttcgacgccaccctgtttggctattcgcgacaggaagcggagtcgatggacccgcagcagcgcctgtttttgcaggcggtctggcatgcgctggaacatgccggttatgcccccggcgccgtcccccataagaccggcgttttcgcctcttcccggatgagtacctaccccggtcgcgaagcattgaacgtgacagaagtcgcgcaggtaaaaggtctgcaatctctgatgggcaatgataaagactatattgccacccgcgccgcgtacaaactcaacctgcacggcccggcgttatcggtacagaccgcctgctccagctcgctggttgccgtgcatctggcctgtgaaagcctgcgcgctggcgaatccgatatggcggttgccggcggcgtggcgctctctttcccccagcaggcaggctaccgctaccagcccggaatgattttctctcctgatggtcactgtcgtccctttgacgcctcggctgagggcacctgggccggtaacggtctcggctgcgtggtgctgcgtcgcctgagagacgcgctgctgtcaggcgatccgattatctcggtgatcctctccagcgcggtcaacaacgacggcaacagaaaggtcggctataccgccccttccgtcgcagggcaacaggcagtcatcgaagaggcgttaatgctggcggccatcgacgacaggcaggtaggttacattgaaacccacggcaccggcacaccgctgggcgacgcgattgaaattgaagcgttacgcaacgtctatgcgcctcgcccgcaggatcagcgctgtgcgctcggttccgtgaaaagtaacataggccatctggataccgcggcgggcattgccggactgctgaaaaccgttctggcagtcagtcgcgggcaaattcctcccttactgaattttcacacccccaacccggcgctgaaacttgaagagagcccctttaccataccggtgtcggcacaggcatggcaggacgaaatgcgctatgcgggcgtctcctcctttggtattggcggcaccaactgccatatgatcgtcgcctcgctgcccgacgcgctcaacgcgcgcctccccaatacggatagcggcagaaaaagtaccgcgctgctgctcagcgccgccagcgacagcgcgttgcggcggctggcgacggattatgccggggcgctgagagagaatgcggatgccagctctctggccttcacagccctgcacgcgcgccgtctcgatctccccttccgcctggcggcgccattaaaccgtgaaaccgccgaggcgctcagcgcctgggctagtgagaaatcgggggcgctggtttacagcggccacggcgccagcggcaagcaggtgtggctgtttaccggccagggctcgcactggcgcactatgggtcaaacgatgtaccagcactcaacggcgtttgccgacacgctggatcgctgtttttccgcctgtagcgaaatgctcacgccgtcactgcgcgaagcgatgtttaaccccgattcggcgcagctggacaatatggcctgggcgcagccggcgattgtcgcgtttgaaatcgcgatggcggcgcactggcgtgctgaaggactgaagccagacttcgccattgggcattccgtcggtgaatttgccgctgccgttgtctgcggacactatacgattgaacaggtcatgccactggtttgtcggcgcggcgcgctaatgcagcagtgcgcaagcggcgcgatggtggcggtatttgcagacgaagacacgctgatgccgctggctcgccagtttgagctggatctcgccgccaacaacggtacgcaacatacggtattttccgggccggaagcccgtctcgcggtattttgcgccacgctctcgcagcatgacattaactatcgtcgcctgagcgtaaccggtgcggcgcactccgctttactggagccgatactcgatcggttccaggacgcctgcgcgggactgcacgcggagccggggcaaataccgattatttccacgctcaccgccgacgtcattgatgagtcaacgctcaaccaggcggattactggcgccgacacatgcgccagccggtgcgttttatccagagtattcaggtggcgcatcagctcggcacccgcgtttttctggagatggggcccgatgcccagttggttgcttgcgggcagcgcgaataccgcgataacgcatactggatagccagcgcccggcgtaacaaagaggcgagcgatgtcctcaatcaggccctgctccagctttacgctgccggcgtcgccctaccgtgggccgacctgctggcgggcgatggacaacgtatcgctgcgccatgttatccgtttgatactgaacgttactggaaagagcgcgtctccccggcctgcgagcctgccgacgcagcgctgtctgccgggctggaggtggcgagtcgcgccgcgacagcgctcgatctccctcgcctggaagcgcttaaacagtgcgccacgcgactgcacgccatctacgtcgatcaactggtacaacgctgtaccggcgatgccatagagaacggcgtggacgccatgaccatcatgcgccgtggacgtctgctgccccgctaccagcagctactccagcgcctgctgaataactgcgtggtcgacggcgattaccgctgcaccgacgggcgatacgtccgcgcccgccccattgaacatcaacagcgggaatcactgctgacggaacttgccggttattgtgaaggttttcaggctattcccgacaccatcgcccgtgccggcgatcggttatatgaaatgatgagcggcgcggaagaaccggtggcgattatcttcccgcaaagcgcctccgacggcgtggaagtgctgtatcaggaattcagctttggccgctatttcaaccaaatcgccgccggggtattacgcggcattgtccagacgcgtcagccccgccagccgttgcgtattcttgaagttggcggcggaaccggcggcaccaccgcgtggctgctgccggaactcaacggcgttccggcactggagtaccatttcaccgatatctcggcgctgttcacccgtcgcgcccagcagaaattcgccgactatgattttgtgaagtatagcgagctggatctctgtagwtgcttggcagtctcagggtttccaggcacagtcttacgatcttatcgtggcagcgaacgtgattcacgccacccgccatattggccgcacgctcgataatctgcgccccctgctcaagccgggcgggcgcctgctgatgcgcgaaatcacccagccaatgcgtctgtttgacttcgttttcggcccgctggttcttccgctacaggatctcgacgcccgcgaaggtgagttattcctcaccaccgctcagtggcaacaacagtgccgccacgccggattcagcaaagtggcgtggctaccgcaggatggcagcccgaccgccgggatgagcgaacatatcattctcgccacgctgcccggtcaggcggttagcgccgtaacattcaccgcgccatcagaacccgtgttggggcaggcgctgacggataacggtgattatctcgccgactggtctgattgcgcaggtcagcccgaacagtttaacgcccgctggcaggaggcctggcgtctgctttcacagcgtcatggcgacgctctgcctgtggaaccgccccccgtcgccgccccggagtggctggggaaggttcgcttaagctggcaaaacaaagccttttcccgcggtcagatgcgcgttgaagcccgtcatcctgctggcgagtggctgccgctatcgcccgccgcgcctcttcctgcgccgcaaacgcattatcaatggcgctggacgcccctcaacgtcgccagcattgaccatccgcttacctttagcttcagcgccggtacgcttgcgcgcagcgacgagctggcgcaatacggcatcattcacgatccgcacgcctcttcacgactgatgattgttgaggagagcgaggatacgctggccttagcggagaaagtgatagcagcgctcaccgccagcgcagccggattgattgtggttactcgccgcgcgtggcgagtcgaggaaaatgaagcactctctgcatcccatcacgcgctatgggccttgcttcgcgtcgcggccaacgaacagccggaacggttgcttgccgccatcgatctcgccgaaaacaccccgtgggaaacgctgcatcaagggttgagcgcagtctcactatcacagcgctggctcgccgcacggggtgacaccctttggctcccttcactgtcgcccaatacgggatgcgccgctgaattaccggcaaacgtgtttaccggcgatagccgctggcatctggtgaccggagcgtttggcggattaggccgccttgccgtgaactggctcagagaaaaaggggcgcgacgcatcgccctgctggcgccgcgcgtggatgagtcatggctacgcgacgtggagggcgggcagacgcgcgtctgccgttgtgatgtgggcgatgccgggcaactggccacggttcttgacgatctggcggccaacggcggcattgccggagcgattcatgccgctggcgtattggctgacgcgcccttgcaggagcttgatgaccaccagctggctgccgttttcgcggtaaaagcgcaggcggcaagccagctgttgcaaaccctgcgcaaccacgacggacgctatcttattctctactcttccgctgccgccaccctcggcgcgccgggtcagagcgcccatgcgctggcctgcggctacctggacgggctggcccagcagttttccacccttgatgcgccgaaaacgctctctgtcgcctggggcgcatggggagaaagcggtcgggcggccacgccggaaatgctggcgacgctcgccagccgaggtatgggcgcgttaagcgatgccgaaggctgctggcacctggaacaggcggtgatgcgcggcgccccgtggcgactggcgatgcgcgtttttaccgacaaaatgcccccgttacaacaggctctgtttaacatcagcgccacagaaaaagccgcaacgccggtcattcctcctgctgatgacaacgcctttaacggcagcctgagcgatgaaacagcggtgatggcatggctgaaaaagcggattgcggttcagctaaggctgagcgatccggcgtcactgcatccaaaccaggatctgttgcaactcggcatggactcgctgctcttccttgaactcagtagcgatattcagcactacctgggcgtacgcatcaatgcggaacgggcgtggcaggatctgtctcctcatggactcacgcagcttatctgttctaagccagaggcgacgcctgccgcttcgcagccggaagtgttgcggcacgacgccgacgagcgttatgcgcccttccctttgacgcccattcagcacgcctactggctggggcgaacccacctcattggctatggcggcgtcgcctgtcacgtcctgtttgagtgggataaacgccacgatgagttcgatctcgccatactggagaaagcatggaaccagctcatcgcacgccacgatatgttgcgtatggtggttgatgccgacgggcagcagcgaatcctggcgacaacgccggagtatcacatcccgcgtgacgatctgcgcgcgctttccccggaagaacagcgcatcgcgctggaaaaacggcggcatgaactgagctatcgcgttttgcctgccgaccagtggcctctttttgagctggtggtcagcgaaatcgacgattgccattaccgtctgcatatgaacctcgaccttttgcagtttgatgtgcagagttttaaagtcatgatggacgacctggcgcaggtctggcgcggtgaaacgctggcgccgctcgctattaccttccgtgattatgtgatggctgaacaggcgcgccgacagacatcggcatggcacgatgcctgggattactggcaggaaaaactgccgcaactgcccttagcgccagagctgccggtggttgagacgcccccggaaacgccacacttcaccaccttcaaatcgacgatcggcaagacagaatggcaggccgtgaaacagcgctggcagcagcaaggcgtcacaccgtctgccgcgctgctcacgctgtttgccgctacccttgagcgctggagccgtaccacaacatttacgctgaacctgacgttcttcaatcgccagccgatccatccgcaaatcaaccagttgattggtgattttacctccgtcacgctggttgattttaacttctcagcgccggtgacgttgcaagagcagatgcaacagacccaacagcgcctctggcaaaacatggcgcacagtgaaatgaacggtgttgaggtgatccgtgagctgggccgcctgcgcggatcacaacgtcaaccgctgatgccggtagtgtttaccagtatgctggggatgacgctggaaggcatgactatcgatcaggcgatgagccatctgttcggcgaaccctgctatgtattcacgcaaacgccgcaggtctggctggatcatcaggtcatggagagcaacggcgagttgatgtttagctggtactgcatggacaacgtgctggaacccggcgctgccgaggcgatgtttaatgactattgcgccatcctgcaagccgtcatcgccgcccctgaaagcctgaagactctcgccagcggcatcgccaggcacattccccgccgacgctggccgctgaacgcgcaggcggactacgacctgcgggatattgagcaggcgacgctcgaataccccggcatccggcaggccagagcggaaataaccgaacagggcgcgttgacgctggatatcgtgatggccgacgatccttcgccatcagcggcgatgcctgatgagcacgaacttacccaactggcgctgccgttgcctgagcaggcgcagcttgatgagctggaggcgacctggcgctggctggaggcgcgtgcgctacaggggatcgcggctacgctaaatcgtcacggcctgtttaccacgccggagatcgcccatcgctttagcgcaatagtacaggcgctgtccgcgcaagcgtctcaccagtgtctgctgcgccagtggctacagtgtctgacggaaagagagtggttaatcctcgaaggtgaaagctggcgctgccgcattccgctcagcgagattcctgagcctcaggaagcgtgcccgcaaagccaatggagccaggcgctggcgcagtatctggaaacctgcatcgcccggcacgacgccctcttctccgggcagtgttctccgctggaattgctgttcaacgagcagcatcgcgttaccgacgcgctgtatcgcgacaaccccgccagcgcctgtctgaatcgctataccgcgcagattgccgccttgtgcagcgcagaacggattctggaggttggcgccggaaccgcagccactaccgcgccggtgctgaaggccacgcggaacacgcgacagtcgtaccacttcacggacgtctccgcgcagttcctcaatgacgccagagcccgtttccatgatgaatcgcaggtgtcttatgccttgttcgacatcaaccagccgctggatttcaccgcccacccggaggcgggttacgacctgatcgttgccgtcaatgtgctccacgacgccagccatgtcgtccagacgttgcgcagattaaaactgttgctgaaagccggcggacgtttgctgatcgttgaagcgacggagcgaaacagcgtattccagctggcgagcgtgggctttattgagggattaagcggataccgcgatttccgccgccgggatgagaaaccgatgctcacccgctccgcatggcaggaggttctcgttcaggccgggtttgcaaacgagctggcgtggcccgcgcaggaatcgtcgccgctgcgccagcatctgctggtagcgcgttcgcctggcgtaaatcgcccggataaaaaagccgtgagccgctatttacagcagcgctttggcaccggtctgcccattttacagatccggcaaagagaagcgttatttacgccgctgcatgccccgtctgatgcgccgactgagccagccaaacccacgccagttgccggggggaatccggcgctggaaaaacaggtggctgaactctggcaatcgctgctgtctcgccccgtggcaaggcatcacgactttttcgaactgggcggcgacagcctgatggcgacaaggatggtcgcgcagctaaaccggagagggattgccagggctaaccttcaggatctgttcagccattcgacgctgagcgacttctgcgcccatctacaggcggctacgtcaggagaggacaacccgatacccctttgccagggcgacggtgaggaaaccctgtttgtcttccacgcttcagacggcgatatcagcgcctggctgccgctcgctagcgcgttgaacaggcgcgttttcggcctgcaagcaaaatcgccgcagcgctttgccacgctcgaccagatgatcgatgagtatgtcgggtgcatccgtcgtcagcagcctcacggcccttatgtgctggcgggttggtcgtatggcgcgtttcttgcggcgggcgccgcacagcgcctgtacgccaaaggcaagcaggttcggatggtgttaatcgatcccgtgtgccgacaggatttctgttgcgcaaaccgggcggccctgctgcgcctgttagccgaaggacaaacgcctctggcactgcccgaacatttcgaccagcagacgcccgacagccagcttgccgactttatcagcctcgctaaaacggccggtatggtgtcgcaaaacctgacgctgcaagcggcagaaacgtggctcgacaacatcgcgcatctgctgcgtttactgactgagcatacgccgggcgaaagcgttccggtcccctgtctcatggtgtatgccgccgggagacccgcgcactggacgccagcagaaaccgagtggcagggctggataaacaacgccgacgacgctgtgattgaagccagccactggcaaatcatgatggaagccccccacgttcaggcttgtgcgcaacacattacgcgctggctttgcgcaacctcaacgcaaccggagaacacgttatgatgccgtccgcctccccaaaacaacgcgtactgattgtgggcgccaaatttggcgaaatgtacctgaatgcctttatgcagcccccggaggggctggaactggtcggcctgctggcgcagggaagcgcccgttcaagagagctggctcatgcgtttggcattccgctgtatacctcgccggaacagataaccaggatgccggatatcgcctgtattgtcgtgcgttcgaccgtcgccggaggaaccggtacgcagcttgccagacactttctgacgcgcggcgtacacgtcattcaggagcatcccctccacccggatgacatcagttccttacaaacgctggcgcaggaacagggctgctgctattgggtaaacacgttttatccgcatacgcgcgcgggacgcacatggcttcgcgatgcgcagcagctgcgtcgctgtctggctaagacgccgcaggtggtccacgccaccaccagccgacagttgctctactccactctggatttgttgttgctggctctgggcgttgatgccgccgccgtggagtgcgacgtggttggcagctttagcgattttcactgtctgagactcttctggccggagggagaagcctgcctgctgcttcagcgctatctcgatcctgacgatccagatatgcatagccttatcatgcaccgcctgctgctgggctggccggaaggtcatctttcgctggaggcgagctacggccccgtcatctggtcatccagcctgtttgtcgcagaccatcaggagaacgcccacagcctctaccgcagaccggagatcctgcgcgatctgccgggtctgacgcgcagcgcggcgcccctgagctggcgcgactgctgcgaaaccgtcgggccggagggcgtcagctggttgctacaccagttgcgcagccatctggcgggcgaacatccaccagcggcctgccaaagcgtacatcagatcgcgttatcacgtttatggcagcagattttacgtaagaccggcaatgcggagatcagacgcctgacgccgccgcaccacgaccggttagccggtttctacaacgatgatgataaggaggcgctgtgacgcaatctgcaatgtgcataccgctgtggcccgcccggaacggcaatactgcgcatctggtcatgtgccctttcgctggcggcagcagtagcgcgtttcgccactggcaagctgagcaactggctgattgcgcgctttctctggtgacctggccggggcgcgatcgccttcgccatctggaaccgctcagaagcattacacaactggcggcactgctggcgaacgagctggaagcatccgtatcgcctgacacgccgcttttactcgccgggcacagcatgggggcgcaggtggcgtttgaaacctgccgacttctggagcaacgggggcttgcgccacaaggactgattatttccgggtgccatgccccgcatctgcattctgaacgccagctcagccatcgcgatgatgccgactttatcgctgagctgatagacattggcggatgttctcctgaactgcgggaaaaccaggaattaatgtcgctgtttcttcctcttctgcgcgctgatttttacgccaccgagagctatcactacgactcgcccgacgtctgtccgccgctgcgcacgcctgcgctgttattgtgcggcagccacgatcgcgaagcctcctggcagcaggtcgatgcctggcgtcagtggctgagccacgttacaggcccggtggtgattgacggcgatcacttctatcccattcaacaagcccggtccttttttacgcagattgtccgccattttccccacgcattttctgcaatgaccgcgtggcaaaaacagcccagtacttcagaaaggtgacgcatgaattcttcctttgaatctctgattgaacagtatcccttacccattgccgaacagttgcgccactgggcggcccgttatgcctcgcgaattgccgtcgttgatgcaaaggggtcgttaacctacagcgcgcttgatgcacaagttgacgaacttgccgcaggtctgtcatcactgggtttgcgttcgggggagcatgtaattgtgcagcttcccaacgacaacgcgtttgttaccctgctgttcgccttgttaagactgggcgttatccccgtgctggcgatgccctcgcaacgggcgctggatatcgacgcgctgattgagctggcgcaacccgtcgcttacgttattcacggggaaaaccacgcagagctggcccgacagatggcgcacaaacacgcctgcttgcgtcatgttctggtcgctggagagaccatgagcgacgattttacgccgctcttctcccttcacggtgagcgacaggcatggccgcagcctgatgtttccaccaccgcgttgttgttgctctcaggcggcacaaccggcacgcccaaactcatcccgcgccgacatgccgactatagctataacttcagcgcttctgctgaactgtgcggcatcagccaacagagcgtgtatctcgccgtcctcccggtggcgcataactttccgctggcctgccccggtattctgggaacgcttgcctgcggcggaaaagtggtgctgaccgacagcgccagctgtgatgaggtgatgcctttaatcgcgcaggaaagagtgactcacgtcgccctggttccggcgctggcgcaattatgggtgcaggccagggagtgggaagacagcgacctttcgtcgctgcgcgtcattcaggcaggcggcgcccggctcgacccgacgcttgctgagcaggttatcgccacctttgactgtaccctgcaacaggttttcggtatggcggaaggcctgctctgttttacccggctggacgatccgcatgccaccattctccacagccaggggcgcccgttgtcccctctggatgaaatccgcatcgttgatcaagacgagaacgacgtcgcgccgggcgaaaccgggcaattgttaacgcgcggcccttataccatttcgggctattaccgcgcccctgcccacaacgcgcaggcctttaccgcgcaagggttttaccgcacaggcgacaatgtcaggctggatgaggtggggaacctgcacgttgagggacgcataaaagagcagatcaaccgcgccggagaaaaaatagccgcggctgaagtggaatcggcactgctgcgtttagcggaagtgcaagattgcgcggtggtcgccgcgccggacacgctgcttggcgagcggatttgcgcgtttatcatcgcgcagcaggtgccaactgactatcagcagttgcgtcaacaactgacccgtatggggctcagcgcgtggaaaattcctgaccaaatcgagtttctggaccactggccgctcaccgccgtcggcaagatagacaaaaaacgcctgacggctctcgccgtcgaccgttatcgccattctgcccaataagcgcaaaccgacccgaaacaggttgaaataaacccgtttcgggtagcactactattagaaatagttatcattttcaattcaccattgtcggtatttttggcgtttcgccgtcttacagggactcacaacaatgaaaatgacacggctttatcctctggccttggggggattattgctccccgccattgctaatgcccagacttcacagcaagacgaaagcacgctggtggttaccgccagtaaacaatcttcccgctcggcatcagccaacaacgtctcgtctactgttgtcagcgcgccggaattaagcgacgccggcgtcaccgccagcgacaaactccccagagtcttgcccgggctcaatattgaaaatagcggcaacatgcttttttcgacgatctcgctacgcggcgtctcttcagcgcaggacttctataaccccgccgtcaccctgtatgtcgatggcgtccctcagctttccaccaacaccatccaggcgcttaccgatgtgcaaagcgtggagttgctgcgaggcccacagggaacgttatatggcaaaagcgctcagggcgggatcatcaacatcgtcacccagcagccggacagcacgccgcgcggctatattgaaggcggcgtcagtagcagcgacagttatcgaagtaagttcaacctgagcggccccattgaggatggcctgctgtacggcagcgtcaccctgttacgccaggttgatgacggcgacatgattaaccccgcgacgggaagcgatgacttaggcggcacccgcgccagcatagggaatgtgaaactgcgtctggcgccggacgatcagccctgggaaatgggctttgccgcctcacgcgaatgtacccgcgccacccaggatgcctatgtgggatggaatgatattaagggccgtaagctgtcgatcagcgatggttcaccagacccgtacatgcggcgctgcactgacagccaaaccctgagtgggaaatacaccaccgatgactgggttttcaacctgatcagcgcctggcagcagcagcattattcgcgcaccttcccttccggttcgttaatcgtcaatatgcctcagcgctggaatcaggatgtgcaggagctgcgcgccgcaaccctgggcgatgcgcgtaccgttgatatggtgtttgggctgtaccggcagaacacccgcgagaagttaaattcagcctacgacatgccgacaatgccttatttaagcagtaccggctataccaccgctgaaacgctggccgcatacagtgacctgacctggcatttaaccgatcgttttgatatcggcggcggcgtgcgcttctcgcatgataaatccagtacacaatatcacggcagcatgctcggcaacccgtttggcgaccagggtaagagcaatgacgatcaagtgctcgggcagctatccgcaggctatatgctgaccgatgactggagagtgtatacccgtgtagcccagggatataaaccttccgggtacaacatcgtgcctactgcgggtcttgatgccaaaccgttcgtcgccgagaaatccatcaactatgaacttggcacccgctacgaaaccgctgacgtcacgctgcaagccgcgacgttttatacccacaccaaagacatgcagctttactctggcccggtcgggatgcagacattaagcaatgcgggtaaagccgacgccaccggcgttgagcttgaagcgaagtggcggtttgcgccaggctggtcatgggatatcaatggcaacgtgatccgttccgaattcaccaatgacagtgagttgtatcacggtaaccgggtgccgttcgtaccacgttatggcgcgggaagcagcgtgaacggcgtgattgatacgcgctatggcgcactgatgccccgactggcggttaatctggtcgggccgcattatttcgatggcgacaaccagttgcggcaaggcacctatgccaccctggacagcagcctgggctggcaggcgactgaacggatgaacatttccgtctatgtcgataacctgttcgaccgtcgttaccgtacctatggctacatgaacggcagcagcgccgtcgcgcaggtcaatatgggtcgcaccgtcggtatcaatacgcgaattgatttcttctgattattgtaaaagggataccgaaaaggtatcccttttacaccactagttaaaaccagtaactcagcagagtcgcaaaaaatattaatccatagtgattatttaaacaatgaaattgcgattaggataaatagatttaactttctcgttcctttctctccttatactaaagaaataatcatatcaaaataaaaattcacaacagtgcaacattaaaaaatacaaccaacaaacaatcctatatacaaggcacatctccagaatataaaagcacagacaaacaacctaaaaaacaatcccatacatataaattattttataggtaaaatagattatatattctcatagctaccataaactatactagcctgaactatatttattctgctgcaatcaatgcatacataacacaaatatcactcaggtacactactcaaaccacgctgggattttcctcaagttataatcatcaccccgaaaatcattcggcatttactcattaaatagtcaccccataggcctgtacatgtttactcagaaatatacatccttttctctgtcataaaccctctgattaatcataaataaatacttgtgacaccaatctttttccttaacggaacgaattgttgtgtagaaggagataatattatgtcaaaaaaatatcagccattgcttataactcattatatgtcaacatgggtcactataacggaagcagttgagatcactaccaaagccataaaacaaaaaattactcctagcgatatttatcgtcatgccttgagtggcaacatcctactattggtctatttccagtctcctgtgatacttaagaagatacaaacttttaatggaaaaataaaattcaggcagtttgtgggagacctacttgataaactatgcatgcttgacagggacggttttatttatggtcaaaatttaagactctgtacagaagccagatatatttgtcctgtgcaacaaattatagatacccccctgttacgcaaactcaaccagtttcgtacgtttgttcgtaatgtccgcccgggtgatgaactggatctccaggcacaagttagtgaaaaaaatttaaccccgccgccgggtaacagcagtggcaaccttgagcaacagatagccagtacttcacagctaattggatctctgctcgccgaagatatgaacagcgagcaagcggcaaacatagcacgtggatgggcctcttctcagacttcaggggtaatgacagactggttaagccgcttcggtaccgcaagaatcacgctgggcgtggatgaagatttcagcctgaagaactcccgtgacggcaaccctcgaaaatggcgattcgatgcaacaaacagtgaactatgtgccgaacgtcacgaatgctgaaatcacgctggcagccttgaagaatccggtgattgccgacaataacgatctcacgacactaacagcaccgtcgctgatacagagggcaatgcgatagccaacactgaggtaacatttactctaccggaagatgtgaaggcgaacttcacgctgagcgatggcgacaaagcggttactgatgccgatggcaaagcgaaagtcacgctgaaaggtacaaaagcaggcgctcataccgtgacagcatcgatggttggcggtaagagtgagcagttagtggtgaactttactgcggatacgctcactgcgcaggttaatcttaacgttaccgaggacaatttcatcgccaataacattggaatgaccaggctacaagcaatagtgactgatggaaacggcaacccagtagaaggtataaaagttaatttccgtggaacctccgtcacgctaagcagcaccagcgttgaaacggatgatcaggtttttgctgaaattcttgtgacaagcaccgaggtcggactaaaaacagtttcagcctctctggcagataaacctactgaagtcatctcgcgattactgaatgccaaggtagatgttaattctgcgacgattaccagtcaggagatacctgaaggtcaggtcatggtcgcacaagacatagcagttaaagctcacgttaacgaccagtttggcaacccggtgacgcatcaagccgcgacattcagtgcagcgccatcctcgcaaatgatcatcagccagaacacggtctctactaatacgcagggagtagccgaggtcaccatgacgtctgaaagaaacggctcgtatactgtaaaagcatccctagcgaatggagcttcacttgagaaacaactggaggctattgatgaaaaactgacactcacgtccagtccgcttatcggtgtcaatgctcctaaaggcgctactctgacggcaacgctaacctctgcaaatggcactccagtggagggtcaggtcatcaactttagcgtaacgctagaaggtgcgacgttaagtggcggaaaagtgagaaccaactcttcaggtcaggctccagtcgttctgaccagcaataaagtcggtacatatacggtgactgcatcgttccataacggcgtcacaatacagacacagacaaccgtgaaggttactggcaacccaagcaccgcacatgttgctagctttatcgctgatccgtcgactatcgccgccaccaacagtgatttaagtaccttaaaggcaacggttgaggatggcagtggtaacctgatcgaaggtctcactgtgtacttcgccttaaaaagcggctccaccacattaacgtcattaacagcggtgaccgatcaaaacggaatcgcgacaacaaacgtgagatgagcgataacagggagcgtcactgtaagcgcagtcataagcgcaggtggaatgcaaacagtagatatatcgctagtggcaggcccagcagacgcctcgcagtccatccttaagaacaaccagtcatcactgaaaggggactttaccgatagtgctgagctacatcttgttctgcacgatatatcaggcaatccgatcaaagtttctgaagggatggaatttgtgcaatcaggtacaaacgtgccctatatgaaaattagcgcaattgattacagtcaaaatatcaacggtgattacaaagctactgttacaggagacggagagggtatcgcaacgctgatccccgtattgaatggtgttcatcaggcgggcctgagtaccacgatagaattcattagcgcggaaaccagaccaatgatgggtacagtgtcagtgaatagtgcaaacctaccgacagcttcattcccttcgcagggatttaccggggcgtattatcagttgaataatgacaactttgcaccaggaaaaacggcggctgattattcgttttcaagctcggcctcctgggtaggcgttgatgctactggtaaagtgacattcaaaaatgacggtgatagcaatacagtaataatcacagcgcccccaagatccggtggtgctatttaccaaacagttcctcctgaatcgcgttcggtgtgactatgatcattttcggtgagtattgctttgatccaaaggctggttttctgtgatgattgaccagcctcagagtattgatgacaccaccgttcataacagatcggcattactatgcataagtactgcctcaagttctcgccaaaacactttttaatgcctttgcgaattcatccagacttatattatcaattttttgcccaacgacgactgactccgaaacatcggccattgcgggccatcgcgttttgtaatcagcataaattgcaacaacaggggtattataggcacttgccatatgtaatattgaggtgtcaggagttattgcaatataagcatcttttatgattgctgctgaacgtttaatcgagggtgataaggataaacggtagacattattataacaatccactaatgccctggctttatcttcccctttgggtccataaacgatcactattggaatatctgtttcactttgaatttttgctattagattttctgcaatcgataatgaaaatgtacgttcctgcgagctaccgtctaaattgagcgcaatgtaagatcctaacgatcgcatttcctcgcgtacctcatcgagtacatcatcgcttaatggcaattcatatattgacctgactgccggaaaacccgcctcacgcatcataaatgcccatgtcatgggtacaggagtccggagattctgatccatccgggacgcgttcttacacaaaggggaatagcacttcatggttaaaccgacgacctggaaattcgtttttgctttcaactgactgataaatatcatcgttttcaggttctttttacgcatcgcctctatacaaagatccggcgtaccgtattgcagtgttatattcttcgctaaatcttttatttcttttaatgttgcgtgatcctgcatagtcattgtgactaatgttaatttagtctgttcaagtttgagcgcattaaagacttctaaattaattgtcgacataacaattaatagatgcttaattttatgcaattcaagcgcccgaataacaggaaagatggccatagcatcgccaatctgatcgggaatatgtatgacaacaaagtctgttttttcaatattaaaattataagctttataatcgtagtaactaaatgcaatacgtctcaacaatgatactaaaaacataactaacctcgcctccctactggttataatgcaatgcagtctatcagaatcatcagggtgcaattttgtgcatatgcggacttttatgtttcatatctcgaacctgtgggccctctgcttaatccttaaacaacaccagcaactcctgcgctttcatcttccatcgaatttttcatgttgccgctaatcagccataaaatcatttgcagatgcgctctgtcgaggtagtctcataaggttcgtttatagatcgacggcaatgtgagttaccttttccatactaattataaaaagacagtacaaacaggatcattatggactccacgctcatctccactcgtcccgatgaagggacgctttcgttaagtcgcgcccgacgagctgcgttaggcagcttcgctggtgccgtcgtcgactggtatgattttttactctatggcatcaccgccgcactggtgtttaatcgcgagtttttcccgcaagtaagcccggcgatgggaacgctcgccgcatttgctacctttggcgtcggattccttttccgtccgctcggcggtgtcattttcggtcactttggcgaccgactgggacgtaagcgcatgttaatgctgaccgtctggatgatgggcatcgcgacagccttgattggtattcttccttcattctcgaccattgggtggtgggcacctattttgctggtgacactgcgtgccattcagggatttgccgtcggcggcgaatggggaggcgcagcgttgctttccgttgaaagcgcgccgaaaaataaaaaagccttttacagtagcggtgtacaagttggctacggagtaggtttactgctttcaaccggactggtttcattgatcagtatgatgacgactgacgaacagtttttaagctggggctggcgcattcctttcctgtttagcatcgtactggtactgggagcattgtgggtgcgcaatggcatggaggagtccgcggaatttgaacaacagcaacataatcaagcggccgcgaaaaaacgcatcccggttatcgaagcgctgttacgacatcccggtgctttcctgaagattattgcactacgactgtgcgagttgctgacgatgtacattgttactgcctttgcacttaattattcaacccagaatatggggttaccgcgcgaacttttccttaatattggtttgctggtaggtggattaagctgcctgacaattccctgttttgcctggcttgccgatcgttttggtcggcgcagggtttatatcacaggcgcgttaatcggaacgttgagcgcatttcctttctttatggcgcttgaagcacaatccattttctggatagttttcttctccatcatgctggcaaacattgcgcatgacatggtggtgtgtgtgcaacaaccgatgtttaccgaaatgtttggtgccagttatcgctacagtggtgctggagtcggttatcaggttgccagtgtggttggcggtggatttacaccttttattgccgctgcactcatcacttactttgccgggaactggcatagcgttgccatttatttgctggctggatgcctgatttctgcaatgaccgctttattgatgaaagacaatcaacgctcgtgatagcctggcgaagatcatccgatcttcgccttatacttttgtttcacattcctgtgacatactatcggatgtgcggtaattgtatggaacaggagacacacatgaataataagggctccggtctgaccccagctcaggcactggataaactcgacgcgctgtatgagcaatctgtagttgctttacgcaacgccattggcaaatatattacaagtggcgaattacctgatgaaaacgcccgcaaacaaggtctttttgtctatccatcactgaccgtaacctgggacggtagcacaactaatccccccaaaacgcgcgcatttggtcgttttactcacgcaggcagctacaccaccacgattactcgccctactctctttcgttcgtatctcaatgaacaacttacgttgctgtatcaggattatggtgcgcatatctctgtgcaaccctcgcagcatgaaatcccttatccttatgtcatcgatggctctgaattgacacttgatcgctcaatgagcgctggtttaactcgctacttcccgacaacagaactggcgcaaatcggcgatgaaactgcagacggcatttatcatccaacggaattctccccgctatcgcattttgatgcgcgccgcgtcgatttttccctcgcgcggttgcgccattataccggtacgccagttgaacattttcagccgttcgtcttgtttaccaactacacacgttatgtggatgagttcgttcgttggggatgcagccagatcctcgatcctgatagtccctacattgccctttcttgtgctggcgggaactggatcactgccgaaaccgaagcgccagaagaagccatttccgaccttgcatggaaaaaacaccagatgccagcatggcatttaattaccgctgatggtcagggtattactctggtgaatattggcgtgggaccgtccaatgctaaaaccatctgcgatcatctggcagtgctacgcccggatgtctggttgatgattggtcactgtggcggattacgtgaaagccaggccattggagattatgtccttgcacacgcttatttacgcgatgaccacgttcttgatgcggttctgccgcccgatattcctattccgagcattgctgaagtgcaacgtgcgctttatgacgctaccaagttagtcagcggcaggcctggtgaagaagtcaaacagcggttacgtactggcacggtggtaaccacagatgacaggaactgggagttacgttactcagcttctgcacttcgttttaacttaagccgggccgtagcaattgatatggaaagtgcaaccattgccgcgcaaggatatcgtttccgcgtgccatacgggacactactgtgtgtttcagataaaccgttacatggtgagattaagcttcccggccaggctaaccgtttttatgaaggcgctatttccgaacacctgcaaattggcattcgggcgatcgatttgctgcgcgcagaaggcgaccgactgcattcacgtaaattacgaacctttaatgagccgccgttccgataataagttatgaaccttcttatcagaaatagatgtgaaggattaagtaagacatctggcaaatagcctgcaataaacgcgggctgtttgcttccttgggcagatgcgagttttattatcgtcttaatgatttccacatattaaaagcaagtatgctttcaaaacacaattataaaaaatcccgccaacaacattagtttttataaaattaaatataagattatggctttagaatatttttatttctaatagacgagatttttcctgttatgatataatatgtcgaattaacacatgttaacgatttaccagtaatgtaaataaattttcgaggagatcattccagtgggacgtaaatgggccaatattgttgctaaaaaaacggctaaagacggtgcaacgtctaaaatttatgcaaaattcggtgtggaaatctatgctgctgccaaacaaggtgaacccgatccagaattaaacacatctttaaaattcgttattgaacgtgcaaagcaggcacaagttccaaagcacgttattgataaagcaattgataaagccaaaggcggcggagatgaaacgttcgtacagggacgttatgaaggctttggtcctaatggctcaatgattattgctgagacattgacttcaaatgttaaccgtacgattgctaacgttcgcacaattttcaataaaaaaggcggcaatatcggagcggcaggttctgtcagctatatgtttgacaatacgggtgtgattgtatttaaaggaacagaccctgaccatatttttgaaattttgcttgaagctgaagttgatgttcgtgatgtaactgaagaagaaggtaatattgttatttatactgaacctactgaccttcataaaggaatcgcggcgctaaaagcagctggaatcactgagttctcaacaacagaattagaaatgattgctcaatctgaagttgagctttccccagaagatttagaaatctttgaagggcttgttgatgcccttgaagatgacgacgatgtacaaaaagtttatcataacgtcgcaaatctctaatgatattttaaagaaatctgtctttatggcagatttctttaatctcatataattcttataaaaatataatgtttaactcgtcatattgcttataaaaaatccccgttcccagagaaataatatttattaaaatggcaggtcttctttttctgattacagaaggcaaagtggcaataacgcatagtttcccggtaaagacgcgatagcgacatcccgcataaggcatttttctctttatctttgtacggtacttcatggaacagagtttttgaccttgcgaatcgtgatgtctgttgggggcaacttgctcactgaagcgtgagactcgattaagcgcacgaaacacagaaatcaaaaaacccggtcacttttttacaaggtaaccgggtaaaaataatttttattttttaactgttttgagactcatagagatgtctcaaaactaaaatttggctcctctgactggactcgaaccagtgacatacggattaacagtccgccgttctaccgactgaactacagaggaatcgtgagaacgaggcgaatattagcgatgcccacccacaatgtcaaagcctgttttttaaatttgaaatcgtttgctgaaataatctgcattttgtcgtttattccgacacaactggctttttttcacacttttgcggctcgggtcgagggtatttccatagccaacgtccagtaaccattcgccagtaaaacagcacggcccgcacagcccagtcggcaaacattcccatccagacaccaaccacaccccagccaagcatgattcccagcacataaccgactacaacccgacaaccccacatgctcaacatcgaaacccacatggcgtaacgtgcatcgcgagcacccttaaatccagcgggtagcacccatgaggcagaccaaataggcataaataaagcatttagccaaatcagaatcacaacgacatgtttaacctgtggatcctgggtgtaaaacgatgccataaccccggcaaagggagccgttagccaggcgatggccgttaatccaagagtggaaagccagaacacatgccgcaactgaatctctgcttgcgctatctgtcctacacccaaccttcggcctgtaatgatcgtagaagcagagccgagcgcacttccgggtaagttgataagagccgcaattgaaaacgcgataaaatttccggcaataacactggtccccatcccggcaacgaacatttgggttaataaccgaccactggtaaataacactgattcgacactcgcgggaataccaatccccatgacttcccagataatgctaaaattcagcggtttaaaatagctctttaacgaaatccttagcgcaggattaaaaccaatcgccagcacccacaaaattgccactgcgccaatataacgagaaatggttaaccccaacccagccccgacaaatcccagtcccggccaggagaaaaggccgtaaatcaatatgccgctaataataatattaagaatattcaggctaccgttaatcagtagcggtattttcgtattccctgcaccacgaagtgccccgctaccaatcaaagtgatggcagctgctggataactgagtaccgtcagctccagataagtcaacgccagtgctttaacttctgtcgtggcatcacccgcgacgaaatcaataatttgctcgccaaaatgatgaataagcgttgccaacagtacggcaaacaacgtcatgatcaccaatgactgccgcgtcgccaccctcgctcgtcgtcgatcccgcttaccgagactaaatgccacaacgacagtagtaccaagatcgatagcagcaaaaaaagccataatgaccatattgaagctgtccgccaatcccacgccggccatcgcatcttttcccagccagctgaccagaaaagtgctcagaacccccatcaccaggacacaggcattctccatgaagataggaacagcaagcggggttatctcgcgccagaacaacactttgtagctcttgcgtttagcgtgccagcgagtgccgtgaacaacctggcgtaaagcagaggagatattcaaagccgaccttaattgcagaaagtgaaaccacatttcaaataatgagggagaatcagcaaagctgcaaagattttcgccaacaaattgtctgcaaatgcaacaaactgttgatagaaacggcaaacagttgggaaaattaaaaatcgggtttgacaaaagatttttcgccgttaagatgtgcctcaacagcgattcctctgtagttcagtcggtagaacggcggactgttaatccgtatgtcactggttcgagtccagtcagaggagccaaatttctgaaaagcccgcttttatagcgggctttttgctatatctgataatcaatttcctcttcactgttttccatcacctgccgcttgatatcctcaactgaaagtcctgcattacaaagttccagaaagcgccagacatagttacgctgaagttgtcctcgcttcagtcccaaccagacagtattagcatcaaaaatatgccgcgtatccaggcggattaaattcttttcctcttgttcaccgctggattgttcggcaactattccgatcccaagcccaagagcaacataggttttaatgacatcagaatcctgcgcacttaatacaatatctgccagcaaacctttgcgggcaaatgcgtcatcaatacgtgagcgccccgtaatcccctgtcggtaagtgattaacggccacttcgctattgattccagcgtcaatggtgtaatttgcgtcaagggatgatcgagtggaacaagcaaactatggtgccaacgaaaccacgggaaggcgacgagctgcgggtcattactcaaacgctcgctggcgataccaatatcagcttcaccattatgcaacaacgtcgcaatttcctgtggcgtcccctggattagctcgagccgaacctccgggaaaagttcgcgaaaagatttaatgacctctggcaaactataacgtgcctgagtatgcgtcgttgcaatagtgagaacgccagacgtatcgttggtaaacaggtctgcaagccgacgaacattactggcttcattcagaatacgttctgcaatgaccagtaatgctttgcccggttcagtcatgcccagcagtcgcttacctcgtcgaacaaatatttcgatgccaagttcatcctccagttcccgaatatgacggctgacgccggactgtgaggtaaaaagcatattcgcaacctctgtcaggttgtaatcctgacgtgcaacctcgcggattatctttagttgttggaaattcacggtaaactccgggcagttcagattttccgttattgttaaagtctaatgcccggcataacaaataataaaaacccgcatcttattccatcccgatataacgcttagctcaccaattgccactgccttttttccatcactggagaactcatcactgacattaacaactctttcactgcctgtgcttgtggtgataagttcgctctggcgggtaaatttaatgacaaagagagactcatggaaggtgtggtaatgcgtgacatccacccgtttactgcgccacataacgaacgcgcggccgattcgggtaatactgcaacgcccatgccgctggcaatcgctgcggtaagcgtggcaatagactcaatttcaccaatgacttttgccgtgagtcgccgtagggaaaaagcctcatcaacacgaagtctaacagcactgtaatcactgggaagaaagaggttcatttgcgcaatagcattaacatcaacactttgccccggacaatcttgagtccctaccaggaaaagatcttctttcagtaaagcctgactggatacaccagccacaggggaatgctcataaatcaccgccatatcgagttggtgatttatcagtttttcgttaagcactgcaccgctattttcatgaagatagataacgacctccgggaattcagcgcgaaccgcctgtaataagggcatggtgatggatgacgcagcggttcctggcgcaaagccaatcgagacttgccccgataatgcctgaccaacgttatgcaccgccagttgggcctgctcacactgacgtaaaatggcccgcgcatgggtatagagaatttttccggcgtcagttggcgtaacgccccgttttgtgcgaatcaaaagttgttgattaaactcaccttccagtgtggcaacctgctggctgagcgctggttgtgcgatatgcaatacttcagcagcctgggtcaggctaccaatatctacaatttttacgaagtatttcaggcgtctgaagttcatgttgcctccggtttttaagagtcggcccaagtgccgccattacttacaaccagaatgcaagatgcttgccagttctattttggcgttgatgcgcaagctaaccaactgtcaaataagagattatgatagattcgtcattggctctttttatctgcagtcgcattcacctgccctataaaaggagggtatgcaccacgatggttcattacccaataagattgaaagctcaccactttgttgaaattggcagcaaaaaaacaaaaaaatgcatttcaccctttgacatcaccatgcactgccattaatatgcgccccgttcacacgattcctctgtagttcagtcggtagaacggcggactgttaatccgtatgtcactggttcgagtccagtcagaggagccaaattcaaaaaagcctgctttcgagcaggctttttactttctaattatcaacgctcttaaaacatctgtcttgaaccagaactaatttgcacaggcattcccgatcgacgttgcaacgcagcatttgcgcgatttacatcaacttcttgcccgttgataaacgcccgcaaagatggggttaccggcaatggcacttttcggtcagactcatattctgcacgattgcgcgacagcggctcatgaacttccagccactttgaaccatccggttccgttgtgtatttcactggctgatcaataatttgtacacgagtgcctacaggaacattatcaaacagatatttgatatcgtcattacgcagacgaatacagccctgacttacacggagcccaataccaaaattggcattggtaccgtggatggcatacaacctgccaatataaatcgcgtacagccccatggggttatcgggccccgcaggaacaaatgcgggcaaactctcccctcgtttcgcatattcgcgccgggtgttcggcgttggcgtccaggttggtgcttcttgtttacgttcaacggtagtcacccagttacgcggggtttctcgcccagcctggccgataccaataggaaagacttccactgtattactgtctggcggatagtaataaagacgcatttcagcgacgttaaccacaatccctttacgaacagtggcgggcaaaatcagttgctgcggaatggtgagttgtgagccaggcttcggcaaaaaaacatcagcgcccggattcgcttccagcatgttacttaacccttgcccgtattgtgcggcaaaagtctccagcggctgggtattgtgatcaggaacagttacagtaagcgactgccccaccaaacggctaccctctggaggtaatggataagttaccgccaggctagtatggctggcaaaaagcagagcaaatgagcaaagaatatttacacgacgcatcatgtccctttcctatgtcgcgaaagctatccgttaagtatagcttttatcagacttttcgtttttaactgttcaaatcagaagtcgtattccccggtagaacaatattactggcagcaagttcgcccatgttgttatatatcgcacaggcagcttcgatgatgggcatcgccagagctgcgccactcccctcacctaaacgcatctccatattgagataaggctccagccccaaatgcgacagcgctatacgcgcccctttttctgccgacaggtgagaaggaatgagatactgtttgattgcaggagacatctggcaggctgcgagcgcagcagcataagaaagaaatccatccagcaacacgggtaaaccgcaggaagcagcgcctaacatcacgccagccattccgaccaaatcaaatccccccacttttgccagaacatcaacgccatcctgcggatttggttgattcaacgtaatcgctcggcgcacaacatcaattttattagccagtttatctgtcggcaggtttgcgccaatcccaaccacttcttcaggatcccggccagtgattgtgctgactattgccgctgccggtgtcgtgtttgccatccccagttcacctacaccaaacagcgtgacaccgttttttgccagctcccgcgtataacatatgacgtccaaaagcaacttttcagcctgacggcgactcattgccggagctgaagcaatattgccgctacctcgtgcgacacgcatgttgataagcccggggataggctcagcactatcaataccaacatcaactacgtggacgttagcgcccgcttgtgttgccagcacacacacgccggttgttccgcgggtcatattttcagcctgaatggctgtcacttcttttggggaaatagcgaccccttcctcccagacgccgtgatcggcacacataaccagtaccgcttttttgcccacatgcggtatgccattcaaccccggcattcccgccagttgtatggcaagcgcctccagccttcccaggctaccaacaggtttgagtaacccgtcaatatgccgttgtgcacgcgacatagcggcaggatcgatagcagggatcgtattcagtaaatcggcaagtgtttgcatgtcacgtctctttatagcagtgccagcaggaagaccagttcaccaagctctatagcagctcccagcgtatcgccggtttgcccgcccagcgtacgtttgagaagctgaccgaggatgaaaatcgccaccatcgtcaccaccatagcagccacaccatgcatacccggcaataatacggcagcaaaaatagcggctaagccgagtgtgacgcaggtttgtcgcccatcaattttgccaatgaacacattgccaagcccttcttcccgggcataacgatgacgatacatcaataatgcggcagtcccgcggctgaccgcacatgctgccgccagcgatgcaaggatcggttcgccacgcagagccaactcgcttaataccagaatctttgccagtacaacaaaaatcaatgccagaccgccatgggtgcctaaacggctatcacgcatgatttccaacatgcgatcgcggctacgtgcagaaaatacgccatcacaggtatcggcgaggccgtccagatggaatcccccggtcatcagcgccagcacaagtacgctaaacagtgccgccagtggtacgccacaccatgcctgcagcaccatgaagaccagcccgctaatcgcgccaagcaataatccaattaaaggaaaagtaataataccgcgagaataatgctcgaaatccagtccctgggaccagcgacgcggtacaggcagacgcgtaataaatgagagcatcgcccaaaataatttactcatttgatttttactccaatacccgaaaccaccagccatacttcatttgccgcagcggccagctgctgatttacccgcccggcaatatcacgaaaatgtcgtgccagacgactctccggcacaatccccattcccacttcgttagtcactaatacaacctttgcggggcaacgttggcaggcagcaatcaacgactgaatctcagcattaatcgcctgttccatcgcctgataatcccattcatcagggtctttatcgccgccataatcaaacaacagattagtcaccattgtggtaacgcattccagcaacacaacctcattcgggttaatgtctgcatgaattaattcatcaagatgttgccagcgctccactgtgcgccagtgctccgggcggccttgccgatgatgttctatccgtgcagccatctcatcatcaaggatttgcgaggtagcgatatacagaacctgtgaagagtccccaataagcgcctctgcgtggcgactcttcccgctccgtgcgccccccgtcaccaaaatcatcataccgactcctgattcaattgtatgatggtattcattgaacagaacaatggatcccccaccattgctgaccgcaaaacatttacacgatcaatactgcgcgtaatataattaaaaatccagcattctcaatccattacgaaagaagatggcattgtggaatagccagacttcctcgtgttaacgtccgacaaaatgcgtcattgacagcggtttctgtggattgacacatttcattcagataatgaattaatgctactgccggaccaaccagcaaacgggcattgtgttctgaaatccaggctattgattcaacgtcagcgacagatctgcgctgtaaaagaacttgtaaaacaacgcaatagaattatccggaatggtggcgactatgcactagaacaccacaaattcgctctctcggtaaggcactgtcacagcattcaacagaatgtgacttgccagatttattagcgccaccagatgtttaaccgggtaaccacgacccagtcggggatatattccatcttctcgctgacatcatcaagaataaaaaggtttatcacactcagagcaacgttcttcagcaggcgggataattcttcaacatttaaaagatgtgttattaaaggcatacaaactggacgtattgtattttcttttggtggttgacctaaggtagcagtttatcctgatgcgctgagatttctgtaatatctacgtcaacattctcctcgaatagaaaatgcagccccggcaagtgattcacattttttaacaaaacgttgttagcgtgccattttcagaagctctccaagaaagcgaattcttttctcaaattctgcattctcagacacagctttctactccatggcaatggcccaaatacgaagttgctcaggatcattagtggtgctgagaagttaaataaccatgcggagtaccactcgtcatcacgtatttatatatcatgaagctattgttgtgttttgtacatcagtagatgtattctgatatactccttttgctagacataacctttcacctgcttgcaaagcttctgtgttctgacattgccaaattgttgcaattctgtatccagccttctttcagtcatagcttcgggccgcgataagactcactgatctgaccctgattcctcttgcagactttatagaccaattaaaatgcagtttctgcaggtcaacgtctgaccatcattgtcatcactctggccattagagtaaccttctgcattcatccttttgtaaaaagtttatagactggccccctgaatctccagacaaccaatatcacttaaataagtgatagtcctgatacaagtttttagagtagtcattagtgaacagataattgttaacttagaaccagtaaaatgcaaacgacgcaccacgctgggaaaatcgctgctattcagcagagttttgtaccgagaattgtggccagccacttattgctctcgcgtaagcaggtatccccatcgtttaccagtccagcacatcttgtggtcaggcagaagaagagcaaactgttactggactcactgcatgcatgcatgcatgcatgcatggtggagaaaaatgccacgctatccaaaaatccagactgggagaatggttcagctgtgtactgaatcagtggggcgcactctgttattacagtgttgacggtcaggcggaggcagacataatgccgcggaaaaagccctttgtgccatctgtctcggaaataaaaactttatgttcttcggcggcgagcgcagtgcactgttgtatgggcttatcggcacttgccttctgaacgacattgatccggaagcgtatctgcgccatatcctgagcgtactgccggaataaccttccaaccgtattgatgaactcctgccatggaacgtagttctcaccaataaataagcatcaatatgattctccattaacgcttaccttttctcaggctatttttgcttttttttgcttttccccgccactttatggtgattatcacatcaatatacatcgatagatattaacgtaactgcagtgaggtgaagcatgaaatttgaacgccatcatgaaatattgaaacgactcagtaaattcggttctgtaaaagtatccgatctgtccaatagcctcaatgtaacgaaagaaactattcgttcagatcttaatgaacttgccaggcttggctatctgactcgatgtcatggcggtgcttttatcgtcctagactcgcttgatactattgcgaaaaatgaaatcgcttatgcgcttgaaaattatgatacagcccagggaataaaaaaaggccactcaactatgaaaagtcaagtatgcgttattggttcgtttaatgttgatatcatcagttatttgccgaggcttcccactatcggagaatcgcttctggcaagtaattttatattttcaccggggggaaaaggctgtaaccaggcgctggcagcaagctttgccgatactgatgtttatttcataacaaaagtaggtacagatcactttagtgattatgcgatcaactttatgaattcgtctaagatttataaaagtataatttatcaaacgaaagaaacgcaaaccgaaactgccacgatccttgttaatgaaggtactggcgataatgttattgcgatctatcccggtgccaacatgacaatgtcgtccgatgaaataactattcagaaagaagcgattattaattctgatgtcatacttctgcagctcgaaacaaattataccgctctgcaacaagcgatcacattggcgcaaaaaaacagtatcccggtcattattaacccggcaccctataatgatatcgtcaacgaacttattcaggatgttgattatatcacccccaatgaaacagaagctggtttactgtccggcatagacgtacacgatcttgaatcagctaaacgagctgcagaagctatccacaataaaggggtaaaaaacacggttatcacgctcggtagcaagggctcgctcgcatttgatggcaaaaaattcattcattcgccagcgtttccagcggtcgttaaaaatacggcaggagccggggatgcgtttaacggctctctggcatcaggacttgcgaaaggaaaatcactggaatcagcactgtgttatgccagcgcctttgcatccctagcggtggagacaagcaatgcttccgacatgcctgaacatgaatctgtgatacatcgaattcagagtatacattatcagcaaactatttttacgcattaagaagggacagagaatgaataacaccaaaaaatcactaaaagtgctctttattggggaatcctggcatattcatatgattcattcaaaaggatatgacagttttacctcaagtaaatatgaagaaggtgcgacctggttactccagtgtctgaaaaatagtcaggtagatgtcacctatatgccagcacatacggtacaaattgccttccctgaagatgtggcacagttagaacaatatgatgccatcgttattagtgatattggtagtaatactttcctgctacaaaatgatactttttatcagcttcgcataaaaccaaacgctctcgaactgattaaagaatatgtgaataacggtggtgggttattgatgattggcggctatctctcattcatgggaattgaagcaaaagccaattataaaaatacagttctggctgatgtgctcccggttacgatgttagatggtgacgatcgtgtcgaaaaaccagagggtgttattgcacagccatcacaacctgaacatccagttattaaagggttctctgaatatccttttttcctaggttataaccgggcgatcgctaaagaaaatgctgaggtggtattaacaataaacaacgctccattactggtctttagtaactatcacaacgggaaaatagcctgctttatgagtgactgttcaccgcactggggtacacagcagtttatgtcctggccgttctataccgcgttgtgggtaaatatactgactcatattgcaagataataataataatggggtaactccagttactccatttactataatagaaggattgatgtatgaaaaagaataagtactcaactcccttatggatgcttgccacgattcttgcgggtatgctctcccctatgcaatcagcggtgaatggtcaattaggtcactggttacaggatggtaatgcatgcgcagttatctcctttgccagtggtttagtcgtgatgttttttattattatggcgcgaaaagaaacccggcaacaatttgcggcaattccttctctgattaaaaaccgaaaagttcctctctggaactggtttgccggtctctgtggagcgatggtggtattttctgaaggcgcatcagccagcgcactcggggtcgcaacgtttcaaaccgcactgatctccgcgctattgctgtctggtttactttgcgatcgctttggtatcggtgtcgacgagaaaaaatactttaccccttatcgcatcatcggtgcattatttgcggttattgctacgatttttgttgtgtcacctcagtggcattctacctctttcatcttacttgccattcttccgttcttagctggtttgcttgcaggatggcagcccgctggaaatgcaaaagtagctgaagctacgggatccatgctggtttcaatcacctagaatttcatcgttggattttgtgttttaggcacagcgctagctattcgtgtcgcattagggcacgtcactgttcaattaccagatgtctggtggatgtatcttggcggcccgcttggactaatgtctatcggtttaatggccattttggtcagaggtctggggttactgatgctgggggttgcttcaacggcgggccagttactgggatcagtattgattgacgtattaattccatcgctgggcaatagcgtttatctggtcacgatcatcggaacactgtttgcactggtcggtgcaattgttaccactattccggaatacagaacctcgaaaacaatgaagaaaatggaggtataatcatgaaagattatctacaaactgtgacgggccccgtcgcccgtgaagatatggggctaacacttcctcatgaacatctgttcaacgatctttcctctgttgtggatgctccttgctatcctttttcacaacggcttgttgataaaaaagtcacggcagaaatccagtgggcattaaaacacgatccttattgctgcgctgataatatggaccgcaaacctattgaagatgtgatcttcgaaattaataactttatctcgctcggtggtcgcaccattgttgatgccacagggtctgagtctatcggacgagatgcgcaggcattacgagaagtcgcattaaaaacaggtctgaatattgttgcttcctccggtccctacctggaaaaatttgaaagccagagaattcataaaacggttgatgaactggcgacaacgatcgataaagaattgaatcaagggattggcgatacggatattcgtgccggaatgatcggtgaaataggtgtttcaccgacatttaccgaagccgagcataacagcttgcgggctgcctcgctggcacagattaacaatcctcatgtggcgatgaatattcacatgccgggctggcttcgtcgcggtgatgaagtactcgacattgtgttaggtgaaatgggcgtctcgccaaataaagtctctctcgcacactcggatccgtcaggaaaagacgtggcgtatcagcggaaaatgcttgataaaggtgtctggctggaattcgacatgattggcctagacattaccttcccgaaagagggaatagcgccaggggtgcaggagactgccgatgccgtcgctcatctcattgagttgggatacgccgatcagcttgttctcagccacgatgtcttccttaaacaaatgtgggctaaaaatggcggtaatggctggggatttgttccagatgtttttctggcctatctggcggagcgcggcgtcgataaaacgatcctcaaaaaactctgtatcgataatcccggacgattattgaccgcataaaaccattatcccccggcacattgcgccgggggatgtcaattaataccccgccgttaaatcatccaccaagcgcgagtcggatgcgccgtacaactcaccatccgacccaaccataatgctttgcgtgctgcccatcgcctcattcagcgccactttctgaccttttgcatccagcagcttgagcgtatccggactaaacccttttcaacacgcagctcgtccggcaaccactgatagtggaaacgaggcgcattggtcgcttcggcaacattcattccacaattgatgctgttcaccaccatttgcagcacggtagtgatgatccagctaccggtaacaaagtgagtacataaaggccatactgtcacgaacagtgcaaaagtggctcttccgcaacctgggtgaagattttcatgccagtggactcattaccctccgcctaagtagttcaagtccggctcgaccatacatctggcgtatcagcaccttcaggcgatttacatgaccttcgacaacaccagtactccagcgactgctgattgcctcacatatagccgcagcatcagcttccatccccgcagctacgcaccgaagttctgctgagccgctttcgtggacccgagtgaaccagctgcttagctgtgatttattttaggttttcagaatacggtagaactcgagtaccagttgctgcgctattttcaactccggttctttttcacacatcagactaataaatcggaaagcataattttcttcacccctgattattctccagggcatcaaccagcggcttacccgggacactgaaggaagtcttgcggcagtagtaaccggtgggatccagcctttacgccatttggcaacagcatccctgacgatggtttcactgcctgtaacccccctggccaccatttcccgccatatccggccggagttataattaccacattctcgttgctcttttaaccactccctccatgggtccagaagccctcgctttggaggcctagttgacatttcagggaatgttcctgaacccacccagcgactgactgtcactcgcgacaggcctgtaatacgggatatttccctgaaactacatcccttgttatgcagggccataacctctgtccaacgctgatgccgttttttgcggatgtgctgtttaaggcgttccagacgacggagcgatgctacaggcacagatatttctggctcaggtgatttcttcagtgataactctctgacaacaagacgtatcagaggcatatgtctgtacatcattcgttcaggctcatcaccaatatttttagcaggtgccatcgatcggccacctgtctggcctgaggtgcaccttcacgtgctgctgtcgcatagactccactgcgatcacgcgagacaacctgtatttccggatattttctgaaccaggtcgccagcgtacgctgatcacggccgggaagcaggacgaggggacggtgagtatcaagattgactattaacataccgcagcagtggccccgatgccacgcccactcatcaataccgacatgaggcgcgcctgactgtttcgtctccggggtattgataaccctgcgaagaagagtatcagcactgcaacggagacccgctgccgttgcagcccgttttccagcctcacctccagctattaatcccagttgacgttgtaaattttgtaacgcctgtgaagactgctggtgtgaaccggcgaagggagcaagcgactcggcaaaaattttacgtgaacaagccgggttacggcagtaccagtggcggacggaaaatacaagccatagcgtctgccctgagcagggtagatgctgtatccggcgccgacgacaactatgaacagagtcgctacgcttaaagcattcaggacattgtgctgttttgcgttttccgtggagatggagggttataccgtcagagctaataatttgtcgactgcatcgccatccgcaaggtaactgtagaagtgtcttaagagagtgcattgcgttgcccataacttaaaacagcttagatccttgttcgccagaaagtttcatccattttcttccacccaggttgcggaagaaccacttttcatccgtcgttgacagatgtgaagtatgcgggagaaaaagtgaatatctaactgtaataactcagaccggtacgagtactcggaacgtctacaatcattcagggcaaagtgctaaaatttctctatcccgggatgcccctaccaacgcagcactcccggagatatcattacagctctgcaactgatttccgcgactgaaccgctcagttcctatccttccagttgccttcctgcagccccccctccctgctgtataccccggtaccacaacgcgggcagcacttttctccttcataatcttcgtcacacatcacacaaaaccactttctcaccttcaccgtataatccggaaccgtcataccctgcagatgcaaacgacgggcctctttctctgccgggtcaagccaggtgcatcgcagcaggattttctcagcgacagtcatctggtcatgttcaaaccacggtggttgtccgtcattgccccgctgaagtgttaacgggcatccacaggacacacagcacaaaacgtcctggcggttgtgcttcgctgcttctttcgccgtaacaaaatggcctttgctgtcattcgccatataacagttcagaattcgcatatttcctcctgagttgtccggggaatactgaatcctccggtctggcagtgtgtgcagtaccgctccccataataatcgtggtgacattgtctgcagtgccagctggctttacgcaccacgggtaaggcatccggtacgaattgctgcagacgtttaatcaactgtatttctctgcgctccggcctgacataagggcactgttgaccgtgctctgtcagcctgtcgtcagtgtgttcaaaccagggaagttcagtgtcgtattgcggatggtatctgagtgcactgccacacaagtggcaggtgtagttagcataaggtgcggcctgtgcagtacgggcgcccgtcagacgtccgttgccatcaagagcgataaaggattttgcgtacatagtcatattcctcagccgccagacgacacgcaggcaacagccgtcccggtacgggcagcgtggtcagggtgtgaatggcggttcagttaaaatctggactggagtttgggtaaagcaggctggttgctgttacagcactgtggttgtcacacaatggaacactgacgtaaaaaacagtcagtgggcgagtggatacatcgttgccgccagacaacaacccatacttttggtttgccggatattggcgcgccagtcgtgctcaactccggctacagccaaaattgcgctcaccggtgcagtgagctttggtatgttccttcgccagatagtcagcacgttccagcacctgctgaaagccagtgtcatcatcgcgttccagccacaccgccggccaggccggaaaatgcaccagcgtggcatggcacccgacatccactcccagggcactgcaccacgcctgtttaatcatcccggccagtgatcccggaacacggtaatcaccggcacgacaccaggtatcccggttaaccagcagcatcaggtgatagtgttttttacctttgcactccccaaactcccgggcccagacgtaatgcagggtggtgggatgcacgcgtttaccttcccgatgcttacgtttctggtaagcgtcgattcgggctttcagggcattgatgaagcgggatatcacagctgcgtccgttgctgccggtacatccgggaaacgcaggtcaacccgcaatgccgtcaggcggggatgaacattcagtgcgtgccgcaccgtctcacgaatacgttgctgccagaaggggttgtatttgtaggtcatggttaaatctccgtatggttcatacggaatagccacgtcgtaaaaaatgcgcagagtccctgaagtgacctccggcaggacactgtctcaggcactctgtgataacccgaacggtcgtctccggactgacggttgaattttcagcgttgtttttttaatgtaaaaaaccggttacgggtaaggctgtgaggagggagtgatggtgatacgcaaaaagaagtgcagggactgtggaaacgcgattactcataatacagtgtgttgcccgtattgtggttctgtcgaccccttcggctattaccggaatacagaccgtatcgttaccatactgctggcactgattattgtggtcctgctgactactgtcagcgtcagtgtgtatatactgtgtagctggtgagataacggttcatgtatcccctgagctgacagtgtaccgggtatattaagcgtaaccgacaggttctccttcataccatattaaatttttccaggtattgccgctgccttatttcgtcccatacaggaaaactcgtctgggtttctgacaaatacgcgaaactcacagcccctcaatatcaaccacacgctgtaagccggtaatacctgaaaatcagcctattaccgcccgcgcctccgttaccgaacgctcaggtgaccagactgaagcccagcacgcactcgtaaaatttgcggtcagttccgtcagtcagtgggcaaccgcagagttacgggcttccaggtccacaggagtgagtctataacgcgtgtgggaaatcattttttctggcgttgacagaacgccttacgggctgctacttacccggtgtcccgcaatacagccttagtgttccgttatcggggatccggacgcaccgcaacaaccggggaagtatttctggttagagctgtgtcaagagggatttctcagccctcactcaccggctcagtctcagggcagaagcattaatacactcagttcatgtcttatacaggaatgggcatagggggagctggcgtgtcactgctgattttacgcatcagcgttcatgtatctgcactctgatacagaatgcttcacagcgctctgttaccggagagatttactctcttaggttattctggcaaatcctttacgttactctctgatgacttcttatatttataataccaatcagacaaccttatcccatcggtgatatcagtctcctgctcgccaggaacgggctgactcactgtaaccacctccgaaaacaactctgcaattatcagaacgcctgcttctctccctgtcctcacgaaaactatcccctctttatcgcgcgtgcgtgcggaagcatcttttcgcaacacccccctccgggattccgctacggctctgccatcgcaatccccccgtttatctccggacagccacattcccgattattttttacgtttctccccggttgttatgccggtgaaggtggcgcgctgttttcatgaccacaccggctggtttaacaacatccggaggaacattctcatggctaccccagtttcgctgatggatgaccagatggtcgacatggcgtttatcactcaactgaccggcctaaccgataagtggtttgacaaactcatcaaagatgggggctttcctgcgcccatcaaaatggggcgcagctcccgctggctgaaaagtgaagtggaagcctggctgcaggcgcgtattgcacagtcccgtccgtaatttttaaccactaacccttcgcccacagcagacgcaatctccggcctgccggcggcgctctgctgcctgttatcccccgtgaggaatatgaaaatgaaacaacagtatcagacccgttacgagctgctccatgaaaactaccagaaatggctgaccggcttcacccggcacgccgtatcatggggcgtgtgtcatccgaatatctactatttccataatctgacgcccgggtgggtgtcattcaatggcgaaaaaccggagattgccatcgttccccagagtctgcaccggctgatttatggtccggacaaacggagctccccgtccctggatgatgatctggtggtgaatttatgcaccagcgaacacctgctggttcatcatccgatgctggaagggatcctgctgtctgaatgtgagcgcctgaagcaacattctctggcaaacaaactgatcagcctcttccgtcagtttggcggcacggagttacgtctcaaactggtctggctctgctggcttgacttaatgaccggaaacagccttgacgactggacgaaaaacctgaaacacaaatcagaaaaagatctggagcaatggatcattgcacgtcagggtcagagtgaaccactgacaaatctgatggatcagtacgtgcttatggcataccgtacatcggttgatgccgctcacagttgatgtctgagaaccacagggctggcagcagaaaaccagccctgtggtaaaatacagtaatagcggcgtacatcaggcacgccgctcactcgtccacagatcatatacgtcattatactgcgcgataacggagggcttcagcacccggtcatttctgagcgggtatgaataccattgatgatgcgaagcagccacgggcagaaacgttcttcacaaccaggtgcctccatcttcactgcagtctgaatgtgccggcttgttatccaccagaaatggtatgctccggtacatgcataccccggagactataaacgcactgaatcatagcctcccacctcagcaggaggcagtcagctttcaggcggaaaaacgttgcagttaaagatcgtgagaatcgctgtttcgttgcatagcaacccgaacagttgtagtgaaacattttacctgcatcagcacatggtcaggcgccgtctgtatggcgtggaatactgatgtttcggctgatggcaagcctcattctctgtggaaacaggggcgcgcattagcttctcaaccagagagtgtcacaaagacaaatattgctgaaaatcgcattcatcgttcaggcgtgaatgcccggagacaaaagccgctgtccacacagtccccctctgacctgaacaaaaagcatacacacaacaggctcacctgaccccgaaaaaccataacttcagcaataccagtgacaccagcacgttacctcagtgccacatcttcagaccgcgatcaatctgaaatgtgactatcggggcaatatccctgctttgtggtacacgataaccagaaaacatcccctgaaccgccagccagaaagactggccacaaaaggggtaagctgaaatcgtttatggattacatcgacatatgcctggcagagaatggtaagcgtgcagtgagaaccgtattgacgaagtgaagctggtcaggcaggcagagtaacccgccacgggagcagagcacccacccggttcacaggccagtcggcgatgacatcaagtacatgatgcagatagcgttccggatccacgccgtttaatttgcacgtcccgataagactgtacagtgacgcaccgcgctcaccaccatgatccgagccgaagaacagccagttttttctccccagactgaccagtcgtagggcgttttcggcaatgttattatccacctccacccagccatcttctgcatagcgggtcagcgccggccactggttcagcgcatacccgaacgccttcaccagttctgagtgccttgagagggttttctgtttctcccgcagccacccctccagtgacgccagcagcggcagcactttttggtgccggactgcctgccgttcctctgctcttttacctctgagctccgactcgatggcatacagctcgccgatccgtttcagcgcctcctccgtcagggctgacggggtacggacgtgaacatcgtggatttttcggcgggcatgggcccagcacgtggcttcctttatatggccgtcgcggtagagctcgttgaacccggcgtaggcatcagcctgcagtacgccactgaagcctgcaagatgggtctgagggtggataccttttctgtccgggctgtaagcgaaccacactgcgggggccagcgctgatccggcgttgcggtcgtctcgaacgtacgtccataagcgcccggtcttcgtcttcttattgcccggcaacagcaccgggacaggcatatcgtcagcatggagtttgccgtcggtcaggacatagtgctgaagggcttcatccagcggtgccagcagacgacaacacgcatccacccagcccgacagtacagaacgactcaacactacaccctggcgggcatagatctccgactggcgatacagcggtatgtgctctgcatactttgaggtcagcactcgggccagcagccccggtccggcgatcccccgttcgatggggcgcgaaggagccggggcctgaacgatgcgatcgcaccgacggcaggcatgcttttcacggactgtccggataacccggaaggcgctgcgcatcagctccagctgttcggcggcatcctcacccaggtaactcagcgaaccaccgcactccgggcaacacggctcagtcggcagcagccgcttctcatcccgtgggagtgactcagggaacggtttgcgggtgcgggtctgacgcagcgggcgctgcactgccgggtcatccacccggccggtcagcgtatcgctttcctgctgcagcaggttcaggtcagcttccatttgcgcgatacggcgggataccttttcggaacgactgccgaagttcatccggcgcagcttatccagttgcgcctgcagatggtctatttcgcgttcccggttgctcagcttttcctgcagggcgtggatcaacgcttcctgttcggccaggcgctgtttcagcagaaggatgtcgtcagaagaggtgtcgttcataagcctgtattttaccaggcttattctgcgacaaccaggataaagagcgctacaacatggtcagggatgtcagtaaccgctttggctgtcgccagtcgataccttccatcagcatcgccagttgcgccggcgtcaggaacactttgccatcgcgggctgagggccaggcgaagcgaccacgttctagtcgctttgtcagcaggcacagaccatcgccggtggaccagagcagttttacctgactgccgctgcgtccccggaagatgaagacgtggccggacatcgggtcatctttcagcgcggtctgcacctttgcggcgaggccattgaagccgttgcgcatatcggtgataccggcaaccagccagatttttgtgcctgcgggaagatttatcatacaggcccccgcatcagttcgcgcaggacagtgctcatgagttcagcagagggatgagtcagtgttatttctcctccccgacattttatgtggcaggtagcgggaggagagcaggatggtagttcgaaggttgggagagaagagcccgcctgaagctgcacgggtatcagggcaggaagcgacgatgagttttttcggggccgacagacccgcccttcacgctgccagagccttatccatttaaagagcaggttatcattgacgtcatgtttccgggccagtgcggcaatactgccttcttcttcaagagccagcctgaccagttccattttgaattcaggggaatagtgtttccggggaagtctttctttagcgcgcatgaggtgtccacctgcaaaataagtgggtgcttaagttacaggatcctggattcgggaccagacggtactcagacgacgcttacagagaatgtccggaatgacgaggttatctttgcggagattaaggcaatggtatacgggccgacgttccatgccgcgttactacattcagcccggacgtaaaatgcgcccgtcaaaaagaacggttcgcttcgaaactcagccaggataccacctctccgccacacccgggaagaagttgatatggtggttgccggacaacagcgctcctggattgactgctgcatcactcaaccacgctgaatatcaaaggagagcgttaccggttaaaagagaaacgtaaagctgtggtgatgacccaaaacgcaacgcctgtcagtgaggatgaaatggtgaaaagcggacagcatcagtaacggaagtatcttagcgggtacgaaaatggcaggatcgtgacattgacagaatatctcctgatcatcctgaatgactgcagttgctgtagaaaagtaagctgtctccacccacggcaccacttaacaggcattccgtaacttcccccagacttactatgacgcattatcggtgcactgaaaacgggagagtgcgcttaaaaccgcagaccgcatgcgggtgttactgcatgacagtctggccgtattgtgagatgtcggcaggaaccgatgtccgcgcaggggggaacttcctgcagtacctgacgcttcaaatggtattaaccgtagggtgttgttggttccggatcgcggaaatgggagcacaggtctgctacggggtgtacctctgacagtatatccggctcgctcatctgacagcctctctcccggaaaagaccaaaaatgagatcgtctcctcaacagcagagaagaggtcttgacagacaggctatattgcatacgatttatgaagaaaaagacagcaaatatggaggttatagcggagaataccctacgaaattcctatgaaaaacgattgaaaaaaatatcaaattcgattcgtttttatatgctttttgggagcgtggcgatgacgaactgttgcatgtgcagaggagaatgcacccggaagcaccagaatcatccagaaaggcagaacgattacgcatcaaaccaggagacagcaatatcaaggtaatatactgatttaaaatgaatttacagcaatacgtgaaaacattttttacttaaaggagacagatgcgctgaagagagtgcaggtatttttatataaaaatgagaagtttacgggatgtatatccggcacactatgaccggagaatatcagtcaagcttaaaaagacaataaatacagtgagttaaatacacagagaaaacgtagtatcagagggtacatcttacaacagagactgaatttccggtttttcataaccggcgcattccggaaagtgcaggcggcccggaggttttctgacgccactacctggtagattgttctgtacatcatgtacggaggtttttgtttgcttttttaaaatctgcaaatgtgagaaaagcaggtgaggtgtattgtgggaaaggaactggatgatatctgcaccagctgtccgtatatcgatgctgtaaaacggcacaaacaacagctcggtgccatagaggaatatacacagtggttaaaaaaagaaccacgggcatcttatttttttctgttccagctgtatacccgcattcacaatacatttttctcccaaaagcaacaactcccgttcactcccggtggcactcactgcccggaacctgatgtcacccttcgggacttaacgctttcccctggctaccacagtgattatgcccctcaacccattccggagatggacagttctgctgttgttcccccaactaatgaaaacacctcgcctccggaagatactcccgacaacactccggccggaggcaataccggacaagcggaaaagaccagaaacgcaggactcacacccattcctgaaaaacgttcaggaatgcccccggaacatctgcggtttgccacggggtttccatcgcaaccgaagattgccggtcccagagaaaagccgatgcgcaccgtgcatccggataaaatctaccgtgaaattatatggttctgctccagttacctgctgaaatccggaccagaggctacgaggacgattatcaactcagtattctctgaatgggccagcataaacaatgattacccctcccccttttcgtgggtggacagcagggacagtgaacagtgtgactggttatggaacgccatgcaggtccggtgtgtgggaaccccgctgaatccccttaccccggagcagaaatactggtttgcctgcgccacgtttgataactgggagggctggaatgagcaacaggtacagtttttactggaaagtaatcccagacggaacagagcaaagtttacgcaggtctccttccaggcccccaggattcagcataaagcgattcttcttgatgagctgaaaagtgcccgggagcaacaaaaaaggcgtgatgaacgtgctgatggttccgtccctctgaaactgtccggaaaaatccacaaacagcttgaaagtattgcccgaagtcgtggtgtcctcccaaaaaactgctgaatgaaatgattgagcaggcgtaccatgatttggtggcaaccaggcagaacagccaaatcgattccagataatttcagacagatattatttccgtgaatcccccgccacctttccggtgcgcggggttttgtcttttttcaccgggaatacatgtatgaatccgtctgatgccattgaggcaattgaaaaaccgctctcctccctgccttactcactttcccgtcacatcctggaacatctgcgcaaactcaccagtcacgaacccgtgattggcattatgggtaaaagcggggccggtaaatcctcactctgtaatgcactgtttcagggggaggtcaccccggtcagtgatgttcacgccggcccccgggaagtgcggcgcttccgtctgagtggccacggtcacagcatggttatcactgacctgcccggggtgggcgagagccgggacagggatgcagagtatgaagccctgtaccgtgacattctgcccgaactggacctggtgctgtggctgattaaagccgatgaccgtgccctgtctgtggatgagtatttctggcgacacatcctgcaccggggacatcagcgggtactgtttgtggtgatgcaggccgataaaacggagccctgccatgaatgggatatggccggtattcagccttctcccgcacaggcacagaacattcgcgaaaaaacggagcggtattccgtctgttccggcccgtacatcgggttgttgccgtatcggcccgcaccggctgggaactggatacgctggtcagtgcgctcatgacagcacttcccgaccatgccgccagtcccctgatgacccgcctgcaggacgagctgcgcacggartctgtccgskctcaggcccgtgaacagtttaccggtgcggtggaccggatatttgacacggcggagagcgtctgcattgcctctgttgcacgcacggttctgcgcgccgtccgtgactcggtggtctctgttgcccgcgcggtatggaactggattttcttctgaacccggtggtgatgtaccaggctgttgttacagatttttaactccatgaaaacactatgcaaacgcagccatacccgggttgtccccttgcgttgtgtttctcaagttaatagaatatatcgatcgttgctattatatcgatcgttataaacgatcgtttgtagtaaatgacctcctccgtggttgtcatgaaaatgcgtctcagaaaggttaaataatgcacgaaaagaacatcgccctgctttgtgatgaagccgaccgacttttgcaactgaacattaatctgctccggcaaatggttgatgaaccagatgtgttatctgacagtaagaacgaaaacagactgctttttgataaacagaaagcactgaaaagaattgaggagctggagggcgaacaaatcaaaaccgcccgcagggagatggtgctggctgttgtcggcacgatgaaagcaggtaaatcaaccaccatcaacgccattgtggggcaggaaattctgcctaaccgtaaccgccccatgacctctgtaccgacgctcatccgccacgttcccggaaaaactgagccggtcctccatctggaacatattcagcccgtccgcaatttattaagcacactgcaacaaaaactcgccaccccggcaggacagcaggtcgcacagaccctgcagcaaaccggggatacccgcgaactgctggatattctgacggatgatggctggctcaaaaatgaataccacggggaggaggaaatctttaccggactggcatcgttaaacgatctggttcgccttgctgcggcaatggggagtgagtttccttttgatgaatacgcagaagtgcagaaactgccggtgatcgacgtggaattcagccatctggtggggatggatgcatgccagggaacactcacactgctggatacccccggccctaatgaggccggacaaccgcagatggaagtgatgatgcgggatcaactgcagaaagcctctgcggtgctggcggtgatggattacacccagatgaactcaaaagcggatgaagacgtccgtaaagagcttaatgccattgctgacgtatcagccggccgcctgtttgtactggtcaataaatttgatgagaaagaccgcaatggcgatggggcagatgccgtacgccagaaagttccggcaatgctgaacagcgatgtgctgcccgcctcccgcgtttatcccggatcctcacgccaggcatacctggctaaccgtgcgcttcatgagttacggaaaaacggaacccttcctgttgatgaagcctgggtcgatgattttatcagaggtgccttcggttgcatgaaaaaagaatacgtctgtaaagacagtgaactggcaactgaaggggcgacagacctgtgggaaggctcacttatcgatcaactgataacggaagtcatacagagctcacattccagagctgcggcactggcggttgactctgccgccgcaaaactgatgcagaatgcagaaaatatcagtgaatacctgttgttacgccatcaggggctacagcaaagcattcagtcactgcagtcgcatatcaccagcctgcttgcggatatccgggaaatcgcggactgtcaggagcagatgaccactgatgtcagaatggccatggaggagatcgatactaaaacccgggaattactgacgggggtctgcacctcactggaagaggagctgaatgactatttcagaagcggtaaacgcaaagaacagcaaatgctggaggaagaagacgcagaacaacgaaggtctcagtccggattatgggggaaaatttctcaatggtccggtatcaacaaccagggctgggaggattacaggaaacgagattttgacccggacagccccgaaataaaattcagtgatcgcagggaagctcttgaactgatgacgcaaatcgaatcgaccgtgaccagcctgcaccgtgaggctgaagcacagttccggcctgagctggaaaaaatcgtcaaaggtattgaaactggttttcgtggtacggccctgtatgccrcagaaaacattgccggtcgcatcaatgcccgcctggaggatgagggctttaccgtaaaaatcagttttccggcagtcagccagttacagacccggctcgcggtaaaaataaatctgagtgcgcttatggaggaaagaacggagaccgtcacccgtcgccgtcggcagagtggcgtatggggaaccgtttgtcgatggtttggcaccagtgacctgggctgggaaaactatgacgaggatgtgagtcgcagcgtgatcaatatcaacaaggtcagagaggaagttatgtcactgacccgggcatatttcggggagctgcaggcatccattgagcaggatattaaccagcccgtccgccaggaaatcgatgcctttttctgcgcattcagggagaaagttgaacaactgcgtaacacgctgattcagagctctgaagatcataaacgcgatcagcaggcgcaggaacggcttaccgggcgacttcaggcattaaatgaaagggttcctgagctcattactgacagtaaggcgctgagggaagagctggagacaatgctgtgacttcaccatttattcaacaaattgctgataaccgggtatgtcaggtactcacctgttttcctgaaaaatttgtggttgatttcgcaaacggtattgatgttgcacaggagcatatccgcatggccggagagcgcacgttcttccggcgtttaaaagaggggctgaccggcgaaggtgctgcacggcagaatgccatcaatgckkcgcttgcacagggcgttgagtcatccctgcgctggctgacggaactgacaacgtcgcttgccaccacaaactacgcgattacccgggtaaacgacagggtcagttcactggtcagtgatactgccaggctggcgcattattcggctgacacgcgggagcagttactcaccctggccgatcaggttcaccagaaactgaatcatcttgaagagagactccaccgtgttgaccaggttcagcgggcacagttacatcttgagcagatattctcatggtggagcgccgggcgatatgcgtcattttctcctgccggacgctgttatgtggcacttgaagaactccgttggggcgcgtttggtgatgtgatacgtcagggcgaaacaggccaggttaaccagttactggatattctcagacataaagcattaacgcagatggcacaggagagtggcggtagtgcaaccgtgcgtctgaacactctggactggcttggtggtcagggccgggagcaggcagataacgaatggcatgaagcgattaactggctgggggactggtgcagtgaagagcggcatccggtgatctggtcaaccacgcaggctgcagaatacttaccggttcgcatgccccgtctctgctctgcagaacgtctctctgaaagtatggtcgatgaaatatttcagaagggggctgcatgagtacagaaatgaaaacggggctggtgctgtccggtggcggggcggtgggcgcttatcaggcgggagtggttaaggcactggcagagtgtggtacacagatcagcatggtttcaggggccagcattggcgcattcaatggtgccattatcgcggcctctcccgatctgtcagaagctgccgtacgcctggaggcgctctgggatcatctggggaataatcaggtgctgtcggtaaacagattggtttacttttcattgctgaaaaaattgttccaggcaatgaacctctgccagatccccggacgtgcaggagcactgcttacgacgcttcttcgccatatatcgacaatcaacgggttcgaaaatctgatgactcagccgttgttgtcagatgggcccctgactgcgctgatggatcattatcttgatactgatgctctggcagacgggctaccgttgtatgtgtcgctgtaccccacagaaggaggcatgcaggatattattgactgcattcgtgctgaactgggtgtcggaaccacgaaaaacgccgtttttcagcatatccagagcctgccccgcggacagcagaaaagaggctctgcttgcgtcagccgcgctgcccctgctgttccgtccccgtgaggttcaggggacaatgttcggtgatggtggtatgggaggatggcgaaatatgcagggaaatacccctgtgacgcctctggtcgatgccggatgcaatatggtgattgtgacgcatctgagtgacggttctttatgggatcgccaggcttttccggacaccacaatccttgagatccgtccccggaaaagactgaaacatgcaggtgatggtggcaacagtggcggtctgctcagtttcacatcggcacataccgacacctggcgtcagcagggctatgaagacacgatgctggcgatggagcatatccggaaaccgctggcagcacgtcaggcactgacccggtcagaggcggtattgcagaaaagcctggatataacggaagaggcagattcggcactgagaaacgcgatggcccgacttaaataaagacgctccggagaaacgccaccgcctgtggtggtgtttttcctgtctggtgttattgaaaatattttcagatatatattacctgagagaaagttttacccctcacctgtcaattcactcactggaaatttaattatgaaattacctgtaaagttattaatgagccttatatctctggtcagcgttattgcacgtgccggggaatataaaaattacagccgggatgaaataaaatactggcgatatacatcatacaaggggggaaacttccggaaggtttcactgatgagaaattttccagcgccatttacaacggaagaatatttacaatgaaacgtttacatacccttatgttatttctggcggttctgttcacgggctttaactttaacgcagaagcggctaccgtaaaacaagctcttagttgtaacccagaagcctgggctgaacaacctggagcgtgtccatcaacgtacgagttgtacgaaggtgacgctacctacaaagccgctatcgacaaagcattaaaaccggtcggactgagcggcatgttcggtaaaggcggctatatggatggccctggtggaggtatcacgccagtaaacattaacggtacagtctggttccagggcgacggttgcaaagccaatacctgcggctgggactttatcgtaacactctataacccaaaaacccatgaagttgttggctaccgttactttggtttagatgacccggcctacctggtttggttcggtgaaattggcgtgcatgaattcgcgtatctggtgaaaaactacgtagctgcggttaactaatttaaggagtctatcatgaaaacttttatcaaaactttactcgttgctgtaactattctgttctctgtcttcgctactgcgaaacaagtaaaactgccaaataacatcaaatacgttaatactacagaagcgttttcctgtaccgaaattgacggtatgaattgccagacaaagaatcagttcaactataaagataacagctatgttttcgtgcttgaacgtggtggtgcctggtgctacgactacactgtctcggtagttaacctgaaaaccgggaaagcacaaatgattgaatacggggacaatcaactgtgctcaggtagcaacaaaccgttcttcgaaatcaaaaatggcgtaccgacggtaggagtcatcgacacatccggaaaacctgtcgttgtagcccaggacaaacttaaaatctaaggagtaaaccatgcgtttctctgcacattattaatatcaaaggtaaatacagccccagccattgttaccggaaagccgcttaatgcgtggctcgccagtgaaaggcctctcagacaataaaccttattcatttcacccgtcaggccgcgtcttctccgggagacgcggctttttcatttattgcaccagtaaatcttaaccaccgataaggagcaaagtatgcgattagcaagtcgttttggttatgctgcaaaccagatacgccgtgaccgtccgctgacacatgaagaactgatacgccatgtacccagtatttttggggaagaccggcatacctcccgcagtgaacgctatacgtacattcccaccattaccgtcctggaaaatctgcagcgggaaggctttcagccgttcttcgcctgccagacccgtgtgcgcgacccgggccgccggggatacacaaaacacatgctgcgtctgcggcgggccggagagataaacggagaacatgtccctgaaattattctgctcaactctcatgacggtacctccagctaccagatgctgccgggttacttcaggttcgtctgccagaacgggtgcgtctgtggccagtctctgggggaagtgcgtgttccacaccggggaaatgtagtggagaaagttatcgaaggggcttacgaggtggtgggcgtktttgaccggattgaggaaaagcgtgatgccatgcagtcgctggtcctgccgccaccggcacgtcaggcgctggcacaggcggcactgacttaccgttatggtgacgaacatcagcccgtcaccaccgccgacattctgacgccgcgacgccgggaggattacggtaaggacctgtggagcgcatatcagaccatccaggagaatatgctgaaaggcgggatttccggtcgcagtgcaaaaggaaaacgtatccatacccgggccattcacagcattgataccgacattaagctcaatcgcgcattgtgggtgatggcagaaacgatgctggagagcctgcgctgatgccgtttccctgagtgagggaatcattcagctttcgttcctgaaaaacacacatttatttgttatttaaggagttatctcatgaaaaccgtttctcagaatacccccacaatttattcagctacaacaccagagaataatccgcctcagttggttgccagcctcgtccctgatgaacagcgcatcagcttctggccgcagcattttggcctcattccacagtgggtgaccctggagccccgtgtcttcggctggatggaccgtctgtgcgaagactactgcggtggtatctggaatctgtacaccctgaacaacggcggggcatttatggcacccgaaccggatgacgatgatgacgaaacatgggtactgttcaatgccatgaacggtaaccgcgcagaaatgagcccggaagccgccggtattgccgcctgtctgatgacgtacagtcatcatgcctgtcgtacggagaattatgccatgacggtccattattaccggttgcgggattacgccctgcagcatccggaatgcagcgccattatgcgcatcatcgactgaatggagagaagcacaatgcaacaactttcctttctgcccggagagatgacgcccggcgagcgcagcctcattcaacgggccctgaaaaccctggaccgccatcttcatgaacccggcgtggccttcacctccacccgtgcagcacgggaatggctgattctgaacatggcgggactggagcgtgaagaattccgggtactgtatctgaataaccagaatcagctgattgccggtgaaaccctcttcaccggcaccatcaaccgcacggaagtccatccccgggaagtgattaaacgcgccctgtaccacaatgccgctgccgtggtactggcacacaatcacccgtccggtgaagtcacacccagtaaggcagaccggcttatcaccgaacgtctggtacaggcactgggcctggtggatatccgggtgccggaccatctgatagtcggtggcaaccaggttttctcctttgccgaacatggtctgctttaacccttcacaaccacatcacacctgttttcacttttatcttctgtcttcagaggtatcccattatgaaaattatcacccgtggtgaagccatgcgtattcaccaacaacatccgacatcccgtctttttccgttctgtaccggtaaataccgctggcacggcagtgctgaagcgtataccggtcgtgaagtgcaggatattcccggtgtgctggccgtgtttgctgaacgccgtaaggacagttttggtccgtatgtccggctgatgagcgtcaccctgaactgagtgggaattctgatgagcagaattatcgccactaccggaccattcttagccgattttctgtaaggattttatcgtgtcagacacactccccgggacaacacttcccgacgacaatcacgaccgcccctggtgggggctgccctgcaccgtgacgccctgtttcggggcacgtctggtgcaggagggtaaccgcttgcattaccttgcagaccgcgccggtatcagaggcaggttcagcgacgcagatgcgtaccacctggaccaggcctttccgctgctgatgaaacaactggaactcatgctcaccagcggtgaactgaatccccgccatcagcataccgtcacgctgtatgcaaaagggctgacctgcaaagccgataccctcagcagttgtggttacgtttatctggctgtttatccgacgcccgaaatgaaaaattaactctccagaatagccttctgctacggcctggtgttttcaccacgccacttttccatttttatatctgcatatcaggaaaatcttcagtatgaaaacattacctgtattacccgggcaggcggccagttctcgcccgtctcctgttgaaatctggcagatactgctgtcccgactgctggaccagcactatggcctcacactgaatgacacaccttttgccgatgaacgtgtgattgagcagcatattgaggcaggcatttcactgtgtgatgcggtgaactttctcgtggaaaaatacgcgctggtgctaccgaccagccgggattcagcgcctgtacccgctctcagttaataaacagcatcgatatcctccgggctcgcagggcgaccggcctgatgacccgcgacaattacagaacggtaaataacattaccctgggtaagtatccggaggcgaaatgatgacactggaagccgacagcgttaacgtacaggcgctggatatggggcacattgtcgttgacattgatggtgttaatatcactgaactgattaataaggccgctgaaaacggttattcactccgcgtggtggatgaccgtgactctaccgaaacaccggcaacttatgccagccctcaccagttgctgtaagacaatgcagtgatgcagggtatagtgccattaaccacagaaacagcactgttgtcctgtattaagcaggcaagagaagatgtccttaccctgcgccatctgcagcttctgcaccagaaccggtgaatctcactcaacaggcttcatttcccctgacgccagcctgaatacagctggcgttttcatttataaacagaaaggaaaaccgataataatggaatggacgccccgaccatgaagcaacggtaggatattactgataaaccttccagtggaggtgcgttatggccgttttaacgattagcattgacctgacaaaaaatgaattccaaatccacggtctgggtaggaacagaaaaatctaagctcagaaaacggattaaagtaagcgtcaacggagcaccgtattgacgcttatttattggtgagaactacgttccatggcaggagttcgtcaacacggttggagggccattccggcagtatgctcagaatatggcgcagatacgcttccggatcgataccgttcagacggcaggtgcctgcttttccggcaacaagcaggaatctcagtgctgaagcaggaattagaggtaaaaacgccctaccgggccatgaatcacccggtcattggagtagtaaccaaagcagatttagccagcatggaacaaatatctttggtgaaaagttggttacgggaagctggagcacacaacgtgttagtaaccagtgcagttaataacaatggagttacagaactttttgccttgctgcatacagaagaaggctgttgttaatttcgattggttctcagatgagaatgatgacggtgatacacagataagaatcaatgagcaatgagggttgccgggcaaccctcattgaataaaacgggaattacttcgcttcgccgtttttcatttcgcccatagctttcagctttttggagatatcgcggcgttctttggagagctcggcatttttgatgatgtaatcgtcaacgcgatcttcatagtcacctttcatgctggcgatgatgccctggattgcttcaacgctcatcccaggcttgatgtaatcgctcaggttgtccagcagcaggacgcgcttctggttgtcacggatctttttctcaacgtcctgaatttcacgttgcagtttgttcttacgacggaacagacgaacaaattccagtacgtcctggaatgaaggcttggtagtttccatttttatacccctgataatgtgagagtcggattcgtttaagcaaccgctattcgttagggccaacattactcatagctgccgcagatgacaatgcttttatcccttttcactatcataccctttatccttgctgaatcgaagcagcagcaagatgattctgaagttcaggaattatttgcgcaaggcccggcaaatcagattcgatagcaactcaagctgatgcgccgtttccatgttcagccacacataaccatagattggtgtttccactaccttcaggtcatggtggttattgagcaactgacgcagctcttccacagcatcgttcaatttttccgtattggcaaaaaccggctgcggattaccttcgtacagcgcatgaacaaggctcagcagtatttgctgcatcatgtgctgggtatcacgaagtttttgcgcgttcaataacacgaaatggctggggcgcgtggcccagtacgcattgatttgcaactccagcatacaaaccagattgcggttaatggtctggataccttcatatatcgattttggaatacgggtttctttgctggcgggcgcaatcagcccacgcattttcacggcatcggtcaggagtttttgtagatggctttccagacgtgggcgttcgagtaagttcggtgagaatgcagattgatagacccgattatactcggtcagacttttcgccagttgaatgcgccagtggatgaacgcccgttgtggccagataccggtaaacaacattgccagtaaagagccgaggatcacatcgccgcttcgccataacgccgtattaatttcacctgtcggggaaccaacaacaattgccagcgtcaccccaatcaataaaccttgatacggtttcttgcccagcgccagccaaccgcaaagaaacatagccgccgcgcaccagactaacatcagcggtaacgagattaactccagttgcagagcgataagacctaaaatcgaccccaacaccgtaccgccaatacgttcgaatgcgcgagggacaacgttcccccagaacgagattggccccataatcaccaccatggtgaccagcggccaggtgctttccgggatagtaaacaggcggataatgagaaaagtgagcaggaatgccagcgcgacccgagtaccatgcacaatgcggtaatggcggtatacccggatttcaaacgggcttaatgacttatcggcacgcacgcagaaactccgtaatgaagattaaaagcgctcataactcatctgtcgaccagaaggcgcgcctctgaattatccgacggacaaaccgggaacagtgtaatttcccggcaggagcgaaaaaattgaaaggcgcatcttactcttttcgctttcaaaaaaagagtggtcttcgcgtcaacacaccgccctgagatgaattagtgatgttttggctgcaccgcaacatacatttcgatatcccagtacccatcttccgcgccattgttcaagtaaacctcgaagcagggctttggtaacatttcataagcactgtcctgcaagaggctattaaagaactgataccagggtttagcaaaatcatcaccgactacacgagccaccgccaccgcatattgaccacctgaaatttctgtcagaatgacgccctcactgttttcggggagcgtaaagttattcggtaccgtcacgacggtgtcgcagcgtaatttttcggcgggtgtttcatccggattgtcgtaatagacagcaacccactccttcggcacaatatttttgctatctacccacatcatcaactgctcaaaacctttctttaccgtctgttcccacgggccaacgagatggaaacctgcaacggtacgtttatcttcctgcttaatctcgtagttcatgacgcctccattaacactgtttttatatacagtatagttgcaatattaaaaccacaaggaatgagtgttgattatgcgagcagactcgcactcctgccagtctgctgcaaaagaaaggtcaggccttatggtggaaataatcactcaggcgggaaaacatgccgccttccccgacagattccagggtaaccagcggccagtgcgccacctgtttatcacggtcgtaaagttcaatttcccctacccgctgatgggcgctaattggcgcggtgagctctttaccatcaagggtatatttggctttgatatgtggaatttcggctttcggtagcaccatccagaactcttgttccgttcccaggtcgatattttctttatcgccataccagatgcgttccgttccgacctttttcccacggtgcaaaatttgcaccgtagtaaagttttgttgcccccaacgcagtaattttcttgcctcttcctcacgaccttttgcactgtcagcccccattaccactgcaatgagacgacgctgcccatctacagccgaagcaatgagattaaacccggcaccagaagtatgacccgttttcaggccgtcaacattcatggttttatcccacaacaacccgttacggttttgctgggtgataccgttccaggtgagacttttctcactgtacatatgataaaactcgggctcgccgtggatgatagcgcgagaaagcacagctaaatcataagccgagctatgctggccaggtgcatccagaccatgcactgtttcaaaatgcgtatccttgagatgcagcttctcggcatagttgttcatcatttcaacaaactgccgttgcccaccggcaatatagtcagccagagcaacacaagcgtcatttccggaatccacaattaaaccacggcttaaatcacgtaccgatacgcgatcgccctctttcaaaaacatcagtgaagaaccgacaaacaccggattatctttcgcccacgcatcgcgccccacggtgacaatatcgtctggcgtaatgcgatgactatcgatagcgcgatccacgacataacccgtcatcagctttgtcaggctggcgggattgcgctgttgatgctcattaaccgcggtgaggatctgaccggtggtgtaatccatcaatacccaggacccggcatgaatctctggaggctgaggtgaaaaaggaatgttttccgccgcaaaaccagacgataagttaaaaacgaacaaagaagcagcaataataagacggcgtttcaacagcaaaccctcaggagtttcaaatagctgttctttttacggaaatacttatgaactggctggaataaagtgcaagaaaatgtgactaccctctcatttttatctgacatgatctgttgccactcgctgccaaattgtggcgctaaagctgattagcacggtgatatttgatactctggcagacagcagaaataacggatttaacctaatgatgaatgacggtaagcaacaatctacctttttgtttcacgattacgaaacctttggaacgcaccccgcgttagatcgccctgcacagttcgcagccattcgcactgataacgaattcaatgtcatcggcgaacccgaagtcttttactgcaagcccgcggatgactatttaccccagcctggagcagtattaattaccggtattaccccgcaggaagcacgggcgaaaggagaaaacgaagccacgtttgccgcccgtattcactcgctttttaccgtaccgaagacctgtattctgggctacaacaatgtgcgtttcgacgacgaagtcacacgcaacgttttttatcgtaatttctacgatccttacgcctggagctggcagcatgataactcgcgctgggatttactggatgttatgcgtgcctgttatgccctgcgcccggaaggaataaactggcctgaaaatgatgacggtctaccgagctttcgccttgagcatttaaccaaagcgaatggtattgaacatagcaacgcccacgatgcgatggctgatgtgtacgccactattgcgatggcgaaactggtaaaaacgcgtcagccacgtctgtttgattatctctttacccatcgtaataaacacaaactgatggcgttgattgatgttccgcagatgaaacccctggttcacgtttccggaatgtttggggcatggcgtggcaataccagctgggtggcaccgctggcgtggcatcctgaaaatcgcaatgccgtaattatggtggatttggcaggagacatttcgccattactggagctggatagcgacacattgcgcgagcgtttatataccgcaaaagccgatcttggcgataacgccgccgttccggttaagctggtgcacatcaataaatgtccggtactggcccaggcgaatacgctacgcccggaagatgccgaccgactgggaattaatcgtcagcattgcctcgataacctaaaaattctgcgtgaaaatccgcaagtgcgtgaaaaagtggtggcgatattcgcggaagccgaaccgtttacgccttcagataacgtggatgcacagctttataacggcttttcagtgacgccgatcgtgcagcaatgaaaattgtgctggaaaccgagccgcgtaatttaccggcactggatatcacttttgttgataaacgaattgaaaaactgttgttcaattatcgggcgcgcaacttcccggggacgctggattatgccgagcagcaacgctggcttgagcaccgccgccaggtcttcacgccagagtttttgcagggctacgctgatgaattgcagatgctggcacaacagtatgccgatgacaaagagaaagtggcgctgttaaaagcgctttggcagtacgcggaagagatcgtctaatttgaagcctccgccgctggtacggcggaggacaatgttgagtcaggctttttgaacggtgatgctccacgctgcatcgccaatctgctgataatcggtgatggcatgtccttcttctgccgcccactgtgggattgcttcagttgcctgggtgcaatcaaactcaattaccaactcatcgccgctggccatttctgccagtgctgcttttgcttctatgagtggaaacggacagacctgcgtcaccacatccagctttttaatcgccatctttacaccttacttaatttgccgcagcagttgccagtcgcgccttacgctgcggtcgaacatacacaagccaggacgcagtccagactccgagaatcataaatacaaggccaatccagccctgccaggtcatcattgcagtcatgaccagtccattaccgatagagcaaccacctgcaatgctggcaccgaagcccatcagtacaccacctaacccgctacgtaatgttgtttgtgcatcagcagcgcgaacgcggaactcacggctcgctttggcggcaataaatgaccccacgaagatccctaacaccaggaaaacgccccagttaatgtatttcacgtcacccgcgaccagaaattgcagaatattggccgttggggaagtgatgcctaacccaaacatacgtccggttgcttcactcaggggccaggctaaaagcgcaatcaaaccgatgagtacagctgtgacaaagggatgccagcgtttttcaaacagaatatgagcgatcccggttcggcgcggcggtaaggtcgcgactttgagttttggcttcttcaactctttcatcaccacccagagcgttatcaccagcaaaacggcaaccaacggccacacagacaaattaaaagtatcagcaatagagttatgttcagtagtgtagtgctgcaaggtttgatttaaaccactggcgtgtggagaacgcatcaccgcactcatcaccatataagtgaaaagcgcgatccaactgccgatcaatccctcacccgcgcgataccaggtcccggtggcacatccacccgccagaacaattcccagcccgaaaagatacccacctataacagtaccaagccacgggaacgccccggcttcgtaagtcagtaggcccgcctgaattaacgcaaaaacccccacgctttgtaccgaaattgcaatcagcaaggcgtaaaacatgcgattatttttcgcgatatacatatcgcgaaaaccacctgtcaggcaaaaacgcccacgctgcatgacaaatcccagcagagcaccacaaattagcccgcttaatatcattgaaaacataaattaattaaccagatgaatgttaatgaggaaattattcatgactggtggaatgcagaccaataaccaaattctctaaattagaacaaatggttattaatgaggatttcgataaaaaagaataaaaaaaccggagccaaatattcattcgactccggttgattattagaaaagatgattatgctacgtcttcgtactgcggaaccgggttacggaagctcttggtgacgcaagccaggtaaatcagaccgatagcagcccagatcagacccagaaccattgagctttcttccaggttaacccacagcgcaccaacggtcagcgcaccacacatcggcaggaacagatactggaagtgatctttcagcgtcttgttacgcttctcacggatccagaactgcgagatgaccgacaggttaacgaaggtgaacgccaccaacgcaccaaagttgatcagcgccgtagccattaccaggtcgaagttgattgccagcagggcaatcgcgccaaccaggatgatgttcattgccggagtacgccatttcgggtgaacataaccgaagaagcttttcgggaatacgccgtcacgacccattacgtacatcagtcgcgcaacgcctgcgtgcgccgccataccagacgccagtacggtaatggtggagaagatcagcgcaccaacctggaatgctttacctgcaacatacagcatgatttcaggctgtgacgcatccggatctttaaagcgagagatatccgggaagtacagctgcaggaagtaagttgcaaagatgaagatcatgccgccaatcagcgcggtcaggaaaatcgcacgcgggatcacgcgctctgcatctttggtttcttccgacaggttgctgatgccgtcaaagccggtaaaggagaagcacaggattgtcgccccggtaatcatcgggataacatgcgcatcgccagaccagaacggacgagtgctcgccagcgtaccagcgccttcaccttcaaatacgccataaacaaccatgcccagaatcaccgcgatcagcactacctgcaacacgacgattacagtgttgaagttcgctacggatttcagactacgcaggttaaaggcggtcataaaggccaccagcgccaccacaaacatccacgatgggatggaaggcaccagagcttcaaaatagattttcgccagcagaatgttgatcatcggcgcgaacagatagtcgagcagagaagaccaacccaccataaagccgacagtcgggctaatggatttctgggcgtaagtgtatgcagagccagcagaaggatagcggcgaaccagcttcccgtagctcagagccgtaaacaggatcgcaatcaatgcgaacgcataggctgtcggcacatgaccatccgtgaggcctgaaacgataccaaaagtatcaaacagcgtcatcggctgcatataggcaagacccatcattacaaccggaactaacgtaagcgttttacgcaattccacgcgagaggtgtttggagtaacgttatgcgacatggtcattctcctttacggtgataaccgtcgcgtaagcaaaaaattgccccatttttttggattcctcagcgacaacaactgtcgatttttagtaaatatctatccggtacgaagcccggcctcttggtatgaatgattggtttgaagcaaaaaataaccgacgctgatgaaacgtcggtttttagtcattttttgacagcggcgcattgtgcctaaatgggggggaaatgacaagagaatgagaggcttgtcataataatttttctttaaatggctgattttccgtcatcagattttgcataaacaccggcgatcgcactatttgctaaaatttcatcccgccaccagccgctggcaagccctgcggtctgttcattccagccaatccagacgggttcaaagagagtttgggcgaccactttcttctcgattaacgcgccactatcgagaaaccgttgcgccagataacggggtaaatagccgcagccgaggccgctaatttgcagctccagcttggttttaaaatcgaaaacggtaatggcttcttgttcgtcgagaagttgtgaggccgtagaagcgcctgcctgcgcagtgtcccccaccacaatcgcccgatatcgtttaatgatacgacggtttaacggttcttcttcctgggctaacggatgatgaggcgcgaccgcaaagacttgttccagatcgcccaaccgcgagaaaccaaactcactggaagatggtggctcatgcatcgcgccaacaataatatccgctcgcccctgagtcagggcatcccaggaaccaccgagtacgccattgataaacttcaggcgcgtcacgctatgatgttgataaaaagcttcaatcagtggcgcaagcagagaaaaaggaaacgtgtcgtccacgccaatcaccagctcgttttcccagccttcatgcagtttgatcgcctgcttttccagttcccgcacggtatgcagaacttcccgccctttctctaataacatttttccggtgcgggtgaatttagcgcggtgaccgctacgatcaagcaattgaatattaaggtcgctttccagcttgtgaacggtgtaactcagagcggacggcgtcttgtagagtttggccgacgccgccgcaaaactgccttctttttctaaggcatcgaggatcatcaacacatccagcagtggtttcatacacgcccccttgcagtgcatgcggcgtcctgctggcgtgatcgtttactccagcggcattaccagcggatcgggatactggtattcaaatcccagttcattacaaatccgactgccatcaataatcttaccttttccgctgtccagactatttctgaactgcggaggttccagccccagtaaacgggccatctgcggatagaaaacattacgcgcagggtgagctggcgcacatatattatagatgtgtccgcctttaggtgcctgtaacaacagggtgatagcgccaataacatcttctaaatggactaaattaacaccatgttcaccatcaggcgcggtttttccggcaaagaagcgtccgggatgacgccccggtccgaccaggcccgcaagacgcagaatatcgaccgaagtaccgggtaaattgtgcagccagtcttcgagttcttctaatactcgtccactgttggttaccggattacgcggggtagtttctttcaccgtgccttgcgcgtcgccatagacagatgttgagctggtaaaaataatgcggggaatacgatgggccagcgcgctatccactaactcttgtaccgcttgtaaatagaactcatcgccggggccgctacgacgtgccggaagcgtaatgaccagcgcatcgacatccatcagggcatccagatcgtcagaatcgcaaactaactcaggctccatgcgaagcagatagctatcaatgccactcattcgggccgcttcgacaccatcttgtgtggttttactcccggtgacttgccagcctcgcgctgaaagtgacatcgccagcggcatgcctaaccaccctaacccgacaattgcgacctttttcatccgttatctcctgatacaccttagatctataaggctacgctagcgtatcaaaactgacaattcattctatgaatgaatctgttcaataatgataacgacatgctgcaatgagcagtgaatcgtcggtaaccgcgtataccagacggtgctcctctgtaatgcgtcgggaccagaaacctgacaaattatgtttcaggggttctggcttccccttaccttcaaatggcgttctgcgggtatctttgataagttcattgatctttttaacaattcgcttatctgtttcctgccagtacagataatcgtcccatgattcctcagaccagattagtttcactcaatgatgtccttttccgttcctttgcctgatttcaggctatcgattgagtccatcaatctccgggcgttagcgggggaacgcagtagataagccgtctcttccagggagttatattcttcgagtgacatcagaacacaagcctctccattctgacgagtaataaggatcggggcatgatcttcaacggctttcatcattgttgccgacaaattctgacgcgcttcgctgtagctaattgtacgcatgtcaatctcctcttttgtacagttcattgtacaatgatgggcgttaattaactatttattaattagtttgtagatcaagatattgtcagtgagacgaaaaatccaggcttcgctattttgggtaccgtcagcttagaagacagtcctcttagcgccctcctttccccgctcattcattaaacaaatccatcgccataaaatatataaaaaagcccttgctttctaacgtgaaagtggtttaggttaaaagacatcagttgaataaacattcacagagacttttatgacacgcgttcaatttaaacaccaccatcatcaccatcatcctgactagtctttcaggcgatgtgtgctggaagacattcagatcttccagtggtgcatgaacgcatgagaaagcccccggaagatcaccttccgggggcttttttattgcgcggttgataacggttcagacaggtttaaagaggaataacaaaatgacagacaacactcgtttacgcatagctatgcagaaatccggccgtttaagtgatgactcacgtgaattgctggcgcgctgtggcattaaaatcaatcttcacacccagcgcctgatcgcgatggcagaaaacatgccgattgatattctgcgcgtgcgtgacgacgacattcccggtctggtaatggacggcgtggtagatcttgggattatcggcgaaaacgtgctggaagaagagctgcttaaccgccgcgcccagggtgaagatccgcgctactttaccttgcgtcgtctggatttcggcggctgccgcctttcgctggcaacgccggttgatgaagcctgggacggcccgctctccttaaacggtaaacgtatcgccacctcttatcctcacctgctcaagcgttatctcgaccagaaaggcatctcttttaaatcctgcttactgaacggttctgtcgaagttgccccgcgtgccggactggcggatgcgatttgcgatctggtttccaccggtgccacgctggaagctaacggcctgcgcgaagtcgaagttatctaccgctcgaaagcctgcctgatccagcgcgatggcgaaatggaagaatccaaacagcaactgatcgacaaactgctgacccgtattcagggtgtgatccaggcacgcgaatcaaatacatcatgatgcacgcaccgaccgaacgtctggatgaagtcatcgccctgctgccaggcgccgaacgcccaactattctgccgctggcaggtgatcaacagcgtgtagcgatgcacatggtcagtagcgaaaccctgttctgggaaacgatggaaaaactgaaagcgctgggtgccagttcaatcctggtcctgccgattgagaagatgatggagtgatcgccatgagctttaacacaatcattgactggaatagctgtactgcggagcaacaacgccagctgttaatgcgcccggcgatctccgcttctgaaagcattacccgcaccgttaacgatattctcgataacgtgaaaacgcgtggcgatgaggccctgcgggaatacagcgcgaagtttgataaaaccacggttaccgcgctgaaggtgtctgctgaggagatcgccgccgccagcgaacgcctgagcgacgagctaaaacaggcgatggcggtggcagtaaagaatattgaaaccttccacactgcacaaaaactgccgccagtagatgtagaaactcagccaggcgtacgttgtcagcaagtcacgcgcccggtggcttcggtaggtttgtatattcctggcggctccgccccgctcttctcaacggtattaatgctggcaactccggcgcgtattgcgggctgtaaaaaagtggtgctgtgctcaccgccgccgattgccgatgagatcctttatgcggcgcagctgtgcggtgtgcaggacgtgtttaacgtcggcggcgcacaggccattgccgcactggcgtttggtacggaatctgtgccgaaagtggacaaaatcttcgggccgggtaacgcctttgtcaccgaagcgaaacgtcaggtgagccagcgtctggacggtgcggctatcgatatgcccgcaggcccgtcggaagtgttggtcattgccgacagtggcgcaacgccggatttcgtggcttctgatttgctttcccaggctgaacacggcccggactcacaggtgattttactgacgcccgatgctgatatggcgcatcaagttgccgaggccgtcgaacgccagttggcagaactgccgcgtgccgaaaccgcccgtcaggcacttagcgccagccgccagatcgtgactaaagatttagcgcagtgcgtagagatctccaaccagtacggcccggagcacctgatcattcagacccgcaacgcccgtgaactggtcgatagcattaccagtgccggttcggtatttcttggtgactggtcaccggaatcggcaggtgattacgcctccggcaccaaccacgttctaccgacttacggttacaccgccacctgttccagcctcgggctggcagatttccagaagcgcatgaccgtgcaggaactgtcgaaagaaggcttttctgcgctggcttcgaccatagaaacactggccgccgccgagcgcctgaccgcccataaaaatgccgttactttgcgtgttaacgcccttaaggagcaagcatgagcaccgtgactattaccgatttagcgcgtgaaaacgtccgcaacctgacgccgtatcagtcggcgcgtcgtctgggcggtaatggcgacgtctggctgaacgccaacgaatatcccacagccgtggagtttcagcttactcagcaaacgctcaaccgctacccggaatgtcagccgaaagcagtgattgaaaattacgcgcaatatgcaggcgtaaaaccggaacaggtgctggtcagccgtggcgcggacgaaggtattgaactactgattcgcgctttttgcgaaccgggtaaagacgccatcctctactgcccgccaacgtacggcatgtacagcgtcagcgctgaaaccattggcgtcgagtgccgcacagtgccgacgctggaaaactggcaactggacttacagggcatttccgacaagctggacggcgtaaaagtggtctatgtttgcagccccaacaacccgaccgggcaactgatcaacccgcaggattttcgcaccctgctggagttaacgcgcggtaaggcgattgtggttgccgatgaagcctatatagagttttgtccacaggcatcgctggctggctggctggcggaatatccgcacctggctattttgcgcacactgtcgaaagcttttgctctggcggggcttcgttgcggatttacgctggcaaacgaagaggtcatcaacctgttaatgaaagtgatcgccccctacccgctctcgacgccggttgccgacattgcggcccaggcgttaagcccgcaggggatcgtcgccatgcgtgagcgggtggcgcaaattattgcagaacgcgaatacctgattgccgcactgaaagagatcccctgcgtagagcaggttttcgactccgaaaccaactacattctggcgcgctttaaagcctccagtgcagtgtttaaatctttgtgggatcagggcattatcttacgtgatcagaataaacaaccctctttaagcggctgcctgcgaattaccgtcggaacccgtgaagaaagccagcgcgtcattgacgccttacgtgcggagcaagtttgatgagtcagaagtatctttttatcgatcgcgatggaaccctgattagcgaaccgccgagtgattttcaggtggaccgttttgacaaactcgcctttgaaccgggcgtgatcccggaactgctgaagctgcaaaaagcgggctacaagctggtgatgatcactaatcaggatggtctgggaacacaaagtttcccgcaggcggattttgatggcccgcacaacctgatgatgcagatcttcacctcgcaaggcgtgcagtttgatgaagtgctgatttgtccgcacctgcccgccgatgagtgcgactgccgtaagccgaaagtaaaactggtagagcgttatctggctgagcaagcgatggatcgtgccaacagttatgtgattggcgatcgcgcgaccgacattcaactggcggaaaacatgggtattaatggtttacgctacgaccgcgaaatcctgagctggccgatgattggcgagcaactcactaaacgagaccgttacgcccatgtagtgcgcaacaccaaagagacgcaaattgacgtccaggtgtggctggatcgcgaaggtggcagcaagattaataccggcgttggcttctttgatcacatgctggatcagatcgccacccacggcggtttccgtatggaaatcaacgtcaaaggcgacctctatatcgacgatcaccacaccgtcgaagataccggcctggcgctgggcgaagcgctaaaaatcgcccttggcgacaaacgcggtatttgccgctttggttttgtgctaccgatggacgaatgccttgcccgctgcgcgctggatatctctggtcgcccgcacctggaatataaagccgagtttacctaccagcgcgtgggcgatctcagcaccgaaatgatcgagcacttcttccgttcgctctcatacaccatgggcgtgacgctacacctgaaaaccaaaggtaaaaacgatcaccaccgtgtagagagcctgttcaaagcctttggtcgcaccctgcgccaggccatccgcgtggaaggcgacaccctgccctcgtcgaaaggagtgctgtaatgaacgtggtgatccttgataccggctgcgccaatctgaactcggtgaagtcagccattgcgcgccacggttatgaaccaaaagtcagccgtgacccggacgtcgtgttgctggccgataaactatttttacccggcgttggcactgcgcaagcagcgatggatcaggtgcgtgagcgcgagctgtttgatctcatcaaagcctgtacccaaccggtactgggcatctgcttagggatgcaactgctgggtcggcgcagcgaagagagcaacggcgtcgacttgctgggcatcattgacgaagacgtgccgaaaatgaccgactttggtctgccgctgccgcatatgggctggaatcgcgtttacccgcaggcaggcaaccgcctgtttcaggggattgaagacggcgcgtacttttactttgttcacagctacgcaatgccagtcaatccgtggaccatcgcccagtgtaattacggcgaaccgttcaccgcggcggtacaaaaagataacttctacggcgtgcagttccacccggagcgttctggtgccgctggcgctaagttgctgaaaaacttcctggagatgtgatgattattccggcattagatttaatcgacggcaccgtggtgcgtctccatcagggcgattacggcaaacaacgcgattacggtaacgacccgctgccgcgcttacaggattacgccgcgcagggtgccgaagtgctgcatctggtggatctgaccggggcaaaagatccggctaaacgtcaaatcccgctgattaaaaccctggtggcgggcgttaacgtgccggtgcaggttggcggcggtgtgcgtagcgaagaagacgtggcggcgttactggaagcgggcgttgcgcgcgtggtggtcggctccaccgcggtgaaatcaccagaaatggtgaaaggctggtttgaacgtttcggtaccgatgccttagtgctggcgctggatgtccgtattgacgagcaaggcaacaagcaggtggcagtcagcggctggcaagagaactcgggcgtttcactggaacaactggtggaaacctatctgcccgtcggcctgaaacatgtgctgtgtaccgatatctcgcgcgacggcacactggcaggttctaacgtctctttatatgaagaagtgtgcgccagatatccgcaggtggcatttcagtcatccggcggcattggcgacattgatgatgtggcggccctgcgtggtactggcgtgcgcggcgtaatagttggtcgggcattactggaaggtaaattcaccgtgaaggaggccatcgcatgctggcaaaacgtataattccgtgtctcgacgttcgtgatggtcaggtggtgaaaggcgtacagtttcgcaaccatgaaatcattggcgatatcgtgccgctggcaaaacgctacgctgaagaaggtgcagacgaactggtgttctacgatatcaccgcttccagcgatggccgtgtggtagataaaagctgggtatctcgcgtggcggaagtgatcgacattccgttttgtgtggcgggtgggattaaatctctggaagatgccgcgaaaattctttcctttggcgcggataaaatttccataaactcccctgcgctggcggacccgacgttaattactcgcctggccgatcgctttggcgtgcagtgtattgtagtcggtattgatacctggtacgacggcgaaaccggtaaatatcatgtgaatcaatataccggcgatgaaagccgcacccgcgtcactcagtgggaaacactcgactgggtacaggaagtgcaaaaacgcggtgccggagaaatcgtcctcaacatgatgaatcaggacggcgtgcgtaacggttacgacctcgaacaactgaaaaaagtgcgtgaagtttgccacgtcccgctaattgcctccggtggcgcgggcaccatggaacacttcctcgaagccttccgcgatgccgacgttgacggcgcgctggctgcttccgtattccacaaacaaataatcaatattggtgaattaaaagcgtacctggcaacacagggcgtggagatcaggatatgttaacagaacaacaacgtcgcgaactggactgggaaaaaaccgacggactgatgccggtgattgtgcaacacgcggtatccggcgaagtgttaatgctgggctatatgaacccggaagccttagacaaaaccatcgaaagcggcaaagtcaccttcttctcgcgcactaaacagcgactgtggaccaaaggcgaaacgtcgggcaatttcctcaacgtagtaaatattgcgccggactgcgacaacgacacgctactggtactggcgaatcctatcggaccaacctgccacaaaggcaccagcagctgcttcggcgacaccgctcaccaatggatgttcctgtatcaactggaacaactgctcgccgaacgcaaatctgccgacccggaaacctcctacaccgccaaactgtatgccagcggcaccaagcgcattgcgcaaaaagtaggcgaagaaggcgtggaaaccgcactggcagcaacggtacatgaccgctttgagctgaccaacgaggcatctgacttgatgtatcacctgctggtgctgttgcaggatcaggatctggacttaacgacggtgattgagaacctgcgtaaacggcatcagtgagttgcggggtaagcggatgcgatgttgtttgtcgcatccggcmaaaaaaaacgggcaaggtgtcaccaccctgcccgttttctttaaagctgcaaagattatttcgcgttgtaattacgcagagcattacgccccagcacaatccccgcgccaaccatgccacccagcagcaccgccagaatcaaggtgattgcctttttcggactatcgcgacgaataggtaacgtcggtttcatcacatagcggtaagcatgaatatcaagatcatcaacctttaagttttcaatatccaacaggttttgacgagtctgatagtagtttggcgagaacaccaacggacgggtcgcctcgtgcttaatcatcgactccagcgcttcgctccccaaaaggaacaacgtatcttgcgtcacatcttcagtctgctgaacctgtggctttgtcacctgcgcctgattcgcatactgcaacgcttcctgaatctgacggatacgcagatctttctgctcctgcgcaaccacttcctgggtcttcagagaatcctgcaagtttttcatttgcagcgcgatgttgtctttcaggtctttttccagttcttcatttacctggtcgtcaacttgctggatatacttcgccagctgcttctgcgcaccttcaggtgtttcaccaacataagacaccgccaatggtaacgactggtttttaacggtaggctcaatggtcagcttttctgcttcttcctggttatccagcgtttccgctaatgctgagaatgcagtactgtaacgtccgataagtgaagcctgaatgtcggagactttcggtacagccggaccgtaaatcacattcatcgcgttggtataaccagcgatttgccccacatcaggttgagtaacgatagctgtggaagtccacttttctttggcaacggccagataccctatagccaaggcaatagccacaatgacagagatgataattgtcatcttgccgcgccacaactgcaccagtaaatcaatcaaatcaatctgttccgggtcatggttttgcccagaaacattattattttctactctcatcattaccctaacggacgaaataattttaagtcgccatagtttagcgataatcgccatgaatgctataggataaatgataaaaataatgaattattacaaagggaacataagagaatcagggcgaaaatcgccctgataacaggatgttagtcactgccaaagagatcgcgggtgtagactttgtctgccacatccttaagctcttctgccatacggttggaaataatgacgtcggcttgttgtttgaaggtggcgagatcacgttccaggcgagagttgaagaatgagtcttctttcatcactggttcgtagatgatcacttcaacgcctttcgccttgatacgtttcataatcccctgaatggaagacgcacggaagttatctgacccgctcttcataatcagacgataaatacccaccacttgcggtttgcgtgacaaaatggcatcggcaataaaatctttacgcgtgcggtttgcatcgacaattgccgagatcaggttattcggcacagactggtagttcgccagtaactgcttggtatctttcggcagacaataaccaccataaccaaacgacggattgttgtaatggttgccaattcgtgggtcgagacaaacgccttcgattatttgacgggaattcagacctaaactttctgcgtagctatccagttcgttaaagtacgccacgcgcatcgccaggtaggtgtttgcaaaaagtttaatcgcttctgcttcagtggagtcggtaaacagggtcgggatattttgcttaatcgctccttcctgtaataacgcagcgaaacgttctgcgcgttctgaacgctcaccgatgacaatacgtgaaggatggagattatcgtaaagggctttaccctcacggagaaattccggagagaaaataatattttcagtacgatatttcttatgcatcgctgcggtaaagccaacgggtaccgttgatttgatgatcataaccgcataaggatttatctctactacgtctttaattactgattctacactcgatgtattgaaataattagttttaggatcatagtcggttggagtggcgataatgacataatcagcatcccggtaggcttcatttttatctaatgtggcattaaagtgtattttatctgattgcaaaaactgctgaatttccttatcaactataggagatatccgatcattcagcatagcaacgcgtgacggtaaaatatctaatgccacaacctcatgattttgtgcgattagaagtccgtttgacaagcctacatagccagtaccggaaatggtgattttcatttcatgctctcagaattaacttaactgtgaatcatgatgtttttagcatcctgataagagttaaaagttttaacgctacgtcgatagctggtcaacgcaacgaaaaacaattcagattttctttataagagtagctgatatttattaagttaatattaagcagtgaaatttagtctataagataattggcaaaaaaagcccggcacaatttacgccgggcctcaatttattgctagttaagtcagattaatccagccattcagtatggaacacaccttctttatcaatgcgcttataagtatgtgcaccgaaatagtcacgctgtgcctgaatcaggttcgcaggcagaacagcggcacggtagctgtcataataggcaaccgcagcggcgaaggtcggaaccgggataccgttctgtactgcataagcaacgacatcgcgcagcgcctgctggtaatcatcggcaatttgtttaaagtacggagccagcagcaggttagcgatctgcggattttcggcatatgcatcggtgattttctgcaggaactgcgcacggatgatgcagccagcacggaaaatcttcgcgatttcgccgtagttcagatcccagttgtactcttcagacgcagcacgcagctgagagaagccctgggcgtaagaaacgattttgcccagatacagagcacgacgaactttttcgatgaactcagccttgtcgccagctggctgcgcttgcgggccagagagaactttagatgcggcaacgcgctgatctttcagagacgagatataacgtgcaaacacagactcggtaataagcgacagcggttcaccgagatccagcgcactctggctggtccatttgccagtacctttgtttgctgcttcatccagaatcacatcaaccaggtagttaccgtcttcatcttttttggtgaagatatctttggtgatgtcgatcaggtagctgcttagttcaccgttattccactcggtaaacgtctgcgccagttcttcgttggtgaggttcaggccacctttaagcagagaataggcttcagcaatcagctgcatatcgccgtattcaataccgttgtgaaccatcttcacatagtgacctgcaccatcggcaccaatataggtaacacatggctcaccgtcttcagctactgcggcgattttggtcaggatcggtgcaaccagttcataggcttctttctgcccaccaggcataatggaaggacctttcagcgcaccttcttcaccgccggaaacaccggtaccaatgaagttaaagccttctgcagaaagctcacgattacgacgaatggtgtcctggaagaaggtgttaccaccatcaatgatgatgtcgcctttatcgaggtatggtttgagggaatcaatagcagcatccgtgcctgcacctgctttcaccattaacaggatgcgacgaggcgtttccagagattcaacaaactctttcaccgtatagtaaggaaccagtttcttgcctggattttcggcaatcacttcttccgtcttctcacgggaacggttgaaaatagaaacggtataaccacggctttcgatgttgagcgcaaggttgcgccccatcactgccataccgactacgccaatctgttgctttgacattgtttactcctgtcagggggcaccgccggagcgggtaaaatatattaaatactaacgtaactaagttgatttgaaaagcttaataaaagtggtattacaataatcaatgagcggaggaaattatttccgcaatatattgtatactaatttcagtaatgaaacaggcaatattctagggataatacgaattacacctgtatatatgacacctgtcagattatccaactgtaattcatattttaatttcgccaaaagaatctcactcctaatataggaatatcctttccgtcgacacagcatatttctgcctgcccgaacattaacaagaacctcactcaaattatgagtgcgataatcggctgcaagtatcctaagccataagttataatcttccattagataatgatgttgatatccaccaagcttttcaattacggactttctgaaaacaacagtcatatggttgaaaggatttcttttttttgcaaatttttttatatcttcatggtatataactgaaaatctttttccttgcctaattttcattgtattatcaaattcttcaatggcacttcccaaaagaacaacttcagggtgtgatttcatatagctaagttgaagagcgaaccgttcaggcaaacaaatatcatcagtatccatcctaaaaatcagttcattgcgacaatactgtagaccatgattaagagccttacctagaccaacattattacttaatcgcacaatatcaatgggtaaacgtgatgaaaattcattaacaacatgtagcaaatcatcactaatataaccatcaaagacaattacaatttgatcaggtgcgcatgtattgcttgctatactttctaaacaatcatgcagaaaaagtgcagactctttgtaatacagggataacagaacgctaaatttcattatgatatacaaaccctgaatgttttatacagttttaaaaatccaaaaaccagcttttttcttaatagatatcacatcaagaatgttaactataattgctgaaaaagcagttgcaatagctgcgcctaaagctgaatatataggaatcaatataaaggaaagaactattgcaagaaaggttcccgtaaggacatttttcttatgctctttttccccatcgataaacatgagaattatatcacatgcaccagttaagcaattaaacacttgagatactattaatactatcaaaactgcctgatattgatagaaatcatttccaaatagtaataaacattctttagaatatagaatcaaaattcctgctacaggcactcccaaaaatgaagaaaataaaactgaatgatacgcacttttatgaatggatgtaaaatcctttaaactatacgccctagaaacctgacttgaaatgacaccacttattgctaatacaaaaaaaccaagtaaagttgaaattctttgcgcgacaataaaacctgcgatatctgctttgaccgaaaaaatattaataataatttgtgagccatacattgtaattatttgcagaagctgaattttaaatagctctttacaggatttatcaaacccttctggtttataatataaaggtgaataattcgatgtcaacctatgatataaatacaacagtccaaaggatattaatcccgcaatagtaataatcacgaactgttgctctagcgtcatgaatgataattttttattttctaaataaaatactccccatagaaacgcaatcaataaaaacgagaatagattaaaaatagcccgttgactaaggatcatcatcgttatatttcctattccttgatagaaaaatgaaagaatattcatataaagaaaacaatatcctagtatcaacattaaaacaaacaaaataattaaattgtttatttcatagccttcatataacaaataaaataaaaatgctggtgacaaaattaaaaacattttatttgttcttaagacaacacttcttaatacaccgatttgttttttctcatttccggctaaacgtgctactgccttcgcgatcccaagctcagcaccttgagaagcaatggtcacaaaaattgtaataattgttatatagaagaaaatagtaccagcactttccgcaccaaaaagtcgagccacaatccagctaaaaaggaacgaagaaataacagtaaacattcttaataaaagtgataatattggctgtatatattttaacatattcattaaaataatatctcccatgatgtggagattttttttcgtcgaatctttgcaggtctgatttatgttttacatatttcttatcatatttcttacataaaagtctgatggctttttcggcaagctcattgcatatattgttctcatcagaggtttttgtaagagaaactaatgattcgtcaccccagtttacaagaatttcatttggtccagtaggacaatcagtacttaataccggcgtgcctaatattagtgactctataattacggtaggtaatccttctgaatcagaactcaaaattagaagttgagctttattaataaaatagtatggattagtctgaaaacctaagaaatgaacatatttttcaatattaagttccttgactaaattttgcaaatcattgcgaagttgtccttcgccaataataagtaaatctatttctccatactctcttataattttgggcatagcttttattgttctatcaactctctttctatccgttaatgtagagacagtcacaataaattcctttggtaagggtatatttccttcacattgaattcttgaattaccttctagctcagtaaaattaaaaggattatatatagttataatctctttatcattgaaaccttttaaggtcagtaactcatctgcaattccttttgatacagaaagtaatttaacattacgaaatattttgctcaatggaagcaaagtactaaattctcttctactgaagatctcaattggactgttatgaaagttgacgtaatagttattagataatttactctcaaaataaatcctatcaacattgacatatacattattattaacaattgcatcaaattttttagtgttaataaatttcttaaatgcatacatctcgcatggagcttttaaaaaataaaaaaaactctttaatttcttagcatatagtttttataaaattaaaaaaaacagaattactttgattagtaaagaaaacttgcgaatcatttttatttatagttgtaggattcactttttttattttaaacttatctctaacataaatctctatcccatcatctattttataatgtatattatcaacgcgatcaagaagtaatgctactttatgacctctatcccgaagagacttagctaaattaagaataactctagccccacctgttccgcttaaagcgttattaataaatagtatatttttcatatagattagtgattgataattgttctatccgatgatcgtggagtaaataattcggagttaaagctatctgaaaagatagattgatatgagtagttatttctactttgttgcgattgaaaaaaaataaaaagcaaacaaaaaaataaacacttataaagaagattataactgtattcctttttaaggcttttgatggctaatggtaaagcaataatcaatgatatataaaaatattgcccaaacctcattatatttaaattacccggggcaattatcattaataacccagcagtaaacaataaatttcttaatatataattatctttaagattataaattgaaaacattattagaaagatgtgaaaaacaaacccaagtccagtgccgaaccctccttgcaaatgtgcaaattggctattgccatatatttcattataatatggtatattattatatattaaggcttgtatttccgttgtaaaacctgaaagatacaacactaacaaaccaaataaaccgattattaaagttaatggttcaaatttaaatcgattataaaaataaacaggcattaacattaatgcagataaatggaaaaactagcaatgataatggctataaaatatcttaaaggctcttttttttctataaattttattgaatacaaaaatatggcaacggctaatacttgtctgatacggtcaagtgaatctaaataaaaaccaacaaagcaaaaaactattattccccataagaatatctttctctccaaaataactttgaacacaaaaaacaaggttaaaaatgagtagactgcaaagacaagaacataacctcgatctaatgaactaaataaagtagacagatatccaaaaaagtatttatcatatgtaatatctattctacctgctactatatttttatatatatatacatacgtttcatagtcagggcctacatcaaaacgtagcgcagataataaaaacaaggaacaaaatacacatcctatgcttaaaaacttgacacctcgtgaagtaaataagttaattctttcatgaacgtaagcaaagataattgcaaataacacataaaaattatatatgaaataagatgtcatttcttacctttaacttcaaatttatttgatatattaccaaaatgttttgataataaaggactaaatgatgttcctttgaatattttttcgcgacatggaatgttaaatattcccccagagaatagagtaacagctgttttaatcattggagaattaagcactactaattcaacaggagccttaaccttgttcactttcacatctttaaaatataatgaataatccgtcaattcgcgaggatgctgtcttattactattttttatcattatactcttttattatttcatcgtataatctgatttttcattttcactaataaaaccatcttcacttaaaggctgagttaaaatcatgacgtcagcaaccaattcatcttcgatacagtaattaaagatatgattaatttcttttttttgtactgaattaagtttttcccaagccgcaataaggtcaaaaaactcaactttgtcatttatagttggatcaattatatcaatcattccagaaagaagtattttatttactttggtagagcgcccaaatgtatggcctcctattataagttcatatagacgagaataatgtgggtatctataatttgccaagccgtcctcaagcaagatgaactcgtttaagaagggtttagaaaaaaaaagatgatcttgccctaaaaatcgatagtcttttctattagaaattaattttcttaacttaggatttattatcaacctgaataaaaacaaaataataaaatattttactagttttgttgttccctttttaattatatatcgctctttacctgggaaatttatatcacgaagcgaaacattatctgaatatatatatatagtatcatgcaattgatggttaaataatatacaataaataagcaagcaatatggagaatcaaaaacaaatacattatttctcattttcattatatagctctatactacgaaaggtttgtctatttttaaacacctagtttacagtaaggcttaaataaacttagggctgttaccttaaagttcaaatgacacatcataaaaatccttatattgttcatggttacttaacaggaattctttgatatgcttataggcattattcatcacattatgtttataataagggttcaccgcattcttaataccattaatgtaatgttcatctaagcatttttttattgcttcagaaatgccttcagtactgcattcacaatttataacagtagttccgtgaaccctccctttttgcctgtctccaatattaactgtgggtactccaagcgaaggaacttcaattaaaccagaagaagaattacctattaaaccttgcgagtacttacatagtgcaagatattcctctggtagtatagaaacaaaatatttcgtattattctctttacaaaaatttttaatttttgtgtgattttgtctgaaccagtgtcagaattagaaccaatgaaaacaaaattatattttttaatgaaggagtgtaaactttttaataaagattgaacttgaatttcaggagaaacaccactaagcgtttcaggatgaaaaacaaccacaaaataaggtttagataaccctccaaatttttgttcaagaacatcttttggtggtagagtaagtaaaagtgaattttcagctccaagagcacctatatcataaacgttagatggatgctcccccatctgaattatcctttttctgtattcatgcgttgaggccagatgtaatgaactcattttagtgattgaatgcctaataaattcgtcataattacctaaagttttctcacctccatgaaaatgaataattggtaagttatgcatagctgctgctaatgctaccgacatgatttcatacctatccccaagtatcatcacagcatcaaacttattatcttgaaaatatataccaaattcagataaacatctcgacatggtttttattatctcagcgttcgtgtcattattaatctcgatatctattattttatcgacacgaaaaccatcattttcaataactttgtatgtcattccatacttcttatcacagtgcattccagttgcaactatagatagatctatactatcatcttcttttagttgctgtaataatcttttcattattccatattcagcacgagaacctgttacatataaaatctttttcattttattaactccataagttctttttttagttgtctatatgcttttccgttgaaatgtaacccatcatatgtaaaatcagcagataaattcccaaagtcatcataaaacatatcagaaagtgatacccatctgacgtgattaattttatctaaacccttaaacaagaaagcattcaaatgctcaatgactttattatttctatcaacccttccattaactggaggcaatgataaaaagtagataattacatttggattaagttttactattttatcaattattttcatgagccatcttaaggtgtcattctcatcccaaccctgaataacaatatcatttgtacccaacattaaaaaaaccacatcaccaatttcttttatgagattagcatcaaggataaggttataataatcttcagatgtaatacctgagacaccataattatttacctccttacctgctaaatcagataactcccagttatcaaatatggagtgacctattaatgtgatcggttttatggcatgagttatcgaaaatttttgtttaattcgtcgcgcaacagcttctttgtctattttatttttatttttttgtaacatccgtgaaatagcaaattcaaaatccagcctatcatcaatatctattgaatcagccttattcataatataagccaagctatcagcgccaaaaaaatgtttctttttaagatactcttcaactgtgccaataaaaattgcgccattgggactgtattctttttgattatcttgtcgtctatagccactgtagtcattattgaaattactcagtcgcattgaggaatctaaagttttcattaaatctgaggatatttcgctttctgtcattgaaactaaaaaattggcttcaacatccccctcaaaaagcgtaatggcttcctttatatgatgggcatttctaaaaggagacgtcggttgtaataacataaaatagtcacaatctttattgtgactcaatacattctctataaccatatatgtagttgcagtatctgatgcaagctcttcacttctaataataacttctgcaccgtatctctcagcgatacttttgtattctaatgaatctgttgaaacaataattttattaaagcactgcgattcttttgccgcctctatagtataagctataagaggtttatctattaacattaaaacatttttatttggtaacccttttgatcccgctctagccggaattatcgctatcctattagtcatttaaattagatctcctgttcatcgaatccagaatgacttattaattgatcctcatcgaaatttttttccgccttcttgcctaagatatcataccaatacataggactaattccgtttcctggccgctttgtggtgatattatcaatcgtatatatttcaccttttttaatgttgcattttgccactatggactttcttgctactatcttatttttttgttcagattttgttactattttcgcatagcttcctaaacatttttcaacagcccgaatcccctcacacaataatcgtagctcatctggtgtaactgatgccttatgatcaggcccttcaaaatctttatttagagtaaaatgtttttcgatgaatgtaattccatacggaactgatgcaatagctgcataataacctggtgaatggtcagaaaagccaacgttatatcctttaaattcattctttagaccaataattgagtttaaatttacatcttcatatggtgtaggatattcagtgttacaatgtaatattgtgatcttttcaggaaccattccatttttagtaagaacatttacacttgctttgatttcttcaattgtggccattcctgttgacaatacaatctcttttccctcaatcggcaatctgcttattttttcaagatacgggagattaagcaattcacctgaaggtattttccacattttttgatttcttgaagcaagaaaatcgatagattcaaaatcaaatggtgttgaaaagacatcaagtcctaactcttttgcatattcttcaagttttataaactcttcataaggcagctcaagcttccttgtcatttctaattgggattcctgattaccagttacttttatctgatactctgccttaggtgcgtatttcgaaattaattgatcagctttaaaagtctgaaatttgactgcatcaacaccagcttttttggcttcttcaaccattttttttgcaagattaaaatcaccattatgattacatccaatttcagccacaatatatattttattcatttgcttacctttctcttattaatcttgttggtgttcctgcaacaacaacattattagggatgtttcgtattactactgatccagatccaacaattgtcgagcttcctatttttatttgcccatttacaacagtacaactacctataaaacttttctctccaacatatacatcaccattaaggactacattagttgaaatattcgtacaatatgaaatatgattcccatgttctatcaaggctctagtattaattacgactccatcctctaattgtgaatcacaatttactatagccattttcccaatgtaaatacatgttccgattgaagatcttgttgatacaattgctgttttatcaatgacatttatcgtttcaagctttagatctcgtatttgacttaaccataatgctctatcatcaggatcaccaatggcaataaaataatagtactcagttggcaaactaatatcacttaatgaatgaccaacgataggatatccttgatgcattccggatttcagtgaatcaacaaacccttcaagagcgtattcattatgatccagactatctattactgctttagcaaacccaccagccccgattatgatcaattttttcttcattcacgcaccataagtgaagtttagcatttgaattcgccttccagtgagggcattatcagacacgctaccgccccaggcttaacagctaccagtgcactgtagagatttattttttgaaattagaatccttttaaattattttaaaaatttaaaagaagatattctaattgtcttaccaatccgctctggaaacaaggaaaatcctggaaaactttgactaaaatcctattgctaactcgttgttattctgattgtttatataaaacaacggcaggaatattcgcaacaaattactttcgccacaaatcttcactgccgttataattttcttatcaaccgttacattcggtcagattttcattattcgcttaacagcttctcaatgcctttacggaacttcgccccttctttcaggttgcgtagtccatacttcacaaacgcctgcatataacccatttttttaccgcagtcgtagctatcacctgtcatcagcattgcatcaacagattgttttttcgccagttcggcaatagcatcagtcagctgaatacgtccccacgcaccaggctgcgtgcgttcaagttccggccaaatatcggcagaaagcacatagcgaccaacggccatgatgtctgagtccagcgtctgcggctgatcaggtttttcgataaattcaacaatgcggctgactttgccttcacgatccagcggctctttggtctggatgacggagtattcagagaggtcacccggcatacgttttgccagcacctggctgcgtcccgtttcgttgaagcgcgcaatcatggctgcaaggttgtagcgcagcgggtcggcgctggcgtcgtcgatcacaacgtctggcagcaccacgacaaatgggttgtcaccaatggcgggtcgtgcacataaaatggagtggcccaaacctaaaggttcgccctgacgcacgttcataatggttacgcccggcgggcagatcgactgcacttccgccagcagctgacgcttcacacgctgttcaaggagagattctaattcataagaggtgtcaaagtggttttcgaccgcgttcttggacgcatgagttaccaggaggatttctttgatccctgcagccacaatctcgtcaacaatgtactgaatcattggcttgtcgacgatcggtagcatctctttgggtatcgccttagtggcaggcaacatatgcatcccaagacccgctaccggtataactgcttttaaattcgtcattattttcctacctctaagtggctgatagtgcgtaaattattgccataggttagccaaacggtatggctatataccaaagcttagttccgcataactttgaataaaccttacgataacactacacaccatcagcatctgggttactcggattactcggaattccgcatactgataatttaatcagtacctctttccgaataatcgtagtccaacctggtccttttttctctgactcgtctgcattactcagaaacaaacgttatgtcgtcttttttggcatgaacgaattcatactgcagagttcgatccagaccttgcgacagcgtatacggtgccacaaaacctgaagaatgcactttcgttgcgtcaaactgtgttgttgcgcagaattttttcacgcgcactgagctgacagcgtattttttgcccgtaattttgctcaggatatcaaaacaatatccccccagcattcctagtgggtaaggcaagtgcatagaagggatctttttgttcaggctttgttcaacttcagcaaccaactggttcatgttcaggtctggcttatcaacgtagttataaacctcataacctgcggcaacattcttcagtttgtacttgataaactcaacaatgtttccaacataagccatggacttatagttagtccctgcgcccaccatcataaacttgccgccagcgatctgtttcagcaagttatagacgttaccgcggttccgttcaccgaagataacggtaggacggatgatggttaatgaacgttctgttggtgctttgttataccattcacgcagcacttcctctgcctgccacttacttttgccgtagtggttgaaaggatcgtgtggatggttttcgtcagggttgtgtttgttcaaaccataaacagcaacggaactggtaaagatgatatttttcacgccatttttttccatggccgccagcacattgcgggtaccctgaacgttgacatcataatagagagaagtagggctgacgtcatcgcggtgttccgctgccagtagcacaacagtgtcaaaaccggctaacgcctggtcgagtgcctgttgatcacgaacattaccaatctgtgtgatttctggataaaagtggctctgctgtttgtccaggttcttgatattaaagtcagcaattgccgtttcaagtagtcgggttcctacgaatccggaagctcctatgagcaaaacgttatcgttcataaatcactttagtctggttgttacgtaagaaacacaagataaagatgagtaccttccctgagtagtcaatgctgcccagccccagctttaacagttagtgtgaggattataatcttttagaacattatatccagtaagtttatgaatggtcgcaaatctactctctccgttccggcaatctaaagttaatcttttccacattaacaatatggtgattaatcctgtcgatatcgacggagctttgccctctttcattcaccgcatgaacatttgcaagagacagcagtgtttcttttttcgccataaagacgccgcgaacgtctttgcgcatgtcgaagttcatactcaatgctggtccaactgaggattcctgcatcacattgatattacgcataaaaaggtgttgcggtttattgtgtagctcaagcgacgcacgcttcatctcaatgttagtcagcgccacaaaggagacagcattcccggcagagatttggataccgcgcaatttgtaagcaaggtgggtattatccagttgaatattattcactcggaaattttgcggtatcgagagatatttgcctttaattaccccatagccgattaacatcccggcgctattaatcatttcaatattatcaatcacgaaattgtcacaaccgtaaatagcgactgtcgcgttatcaatacctgctttcttactgaaatccggcgtgatattgcgggctttgatattacgaataacaaaatgtttaccattttcaacatggatcaactgccgacaatccgatcccgtgatattcgccacgacaaagtttttcactgcctggtcttccgggtagttattatcataagtactccccgcaaggcctatgccgatgccccagttgattttgccgttagtacagttgatgcgctcgatgacatggtcagatatcaaaatatcacggtcgttaatcgccacgttccattcaatagcgtccccctgtaagtcgctgaacttacagttggtgatgttgccaccgataatctggttatgaaatccctggcgtaagatggcgtaattagcgtggctaacggtcaggttatcgatggtcaggttacgcatgactcgtttgtttttgccgccaatataaatctgcgttaccgggccaaagccgctcatcgccagccctttaatagtgcagtcagagccgcgcacatccagggtgatgttatgcatactgccgcccttctcccctgtcacctggctgccgtcctgtaagacaaatcgccctctgccgctgccgcgcaggcttccaagaatgtgtaacgttttgccaggaggaatgaagatgccggtgttgatattgtcgcaaaccaatccggcaggcacgacgaccgtttgcccttcgccgaaggcttgtttaaatgaggcgatccagtcgtgtgggttgtagtcgttaatgttaacgctttgtcgggcgggaagtgcgcgagcgaaaggggtatggaggaaggcaagcgccgagcttgccgtcaggaaggtgcgtcgggagagtgttttaaatggcatgcgttctcctctataaagcttgcagcaagctggcgagttctcgattaatcacctgctggttaaaatcgtgttcgactttttcgcgcgcacgtttgacgaccggagccagttcgtcggtgtccagttggctaaacgccgctagtcgttgcgccagtgcgtgagcatcgttctcaggcaccagccagccggatttatcggcctccaccagttctggtattccgctatgcagagttgaaacaaccggaatgccgaccgccattgcttccattagtgccaccggaataccttccatatcgccatccgcgcctgtaaccgatggcaacaggaagacatccgcgttgtcgagcatcgctttcacttcgtggctcggtttaaagcccggcatctccaccacatcttccagttgatattgttcgatgagggtgcgcaggcgtcgttcccacgggccaatgccgaggatgcgatagcgaaatgccacgccctgctctttcaactgacggcaggcttcgatcgccacatgcaggccttttttctcggttaagcgtgcgacggaaatgatttccagcggcgttgcgggcgctttcaccggacgcgggctaaagcgcgtcatgtccacgcccatacgcgatacggcgattttttccctcgggcagcccattttttgcagccttccggcccacaaatcgcttatcggtaacatcaggtcgccacggcgaaacagttgttgatattcgggagtgtagtggttgagcacttcccgactggaaatatcaatgccgtggaaaatggtggcaattttgccgcgaatgacacccagttcgcggagttttgctgcggttacccccgctggaccaaaatgagcgatgaacacatcggcgcgaaacggtgttgcgacctggccgcaaatggcagacaaaatcagattccgcgactctgcgccatagcgtttgaggttgagcgcctgccaggtatttttacgatgaatgcctcgtaacgtctggctggcacggtggcgtagcttcgccactttgcccgtaggttcgtcctgtaaccagcgggttctggcggcaaggttgtatttcgtccatgccgcgtgggtgttctgggtgtcgcctttttgcagcgcgacaatctccacctcaaagcccatatcaataaacgcggtaatttgattgaggacgaaggtttccgaagacagcggaaatttcagtaaaaagaagccgaccttcatttcacctccccgatgcgctcaagcacagattgcaccatctgcattcccgtctgacgctcacgactgacggcttcgctaagtcgtgcgttcagcgccggaagctggcctaaggtatccgcaaccatcgcttgcaggctgccgtctaataaatgacggatatcaattgccatctccggtagtcccagctgctgcataatcccggcggatttatgttcatagttgatggcaatcgccggagtagcaaagttcattgagataatggcggagtgcaggcgcgtaccgacggtgagttcacaggcaccgagaattttgcccatttccagatcgttgagttcatccatcactacgtgataacgggcaggatcgctgatatgctggcgcaggttgagcgccaccatgcggtcgtctttgttatagctgtcgatgcccgtacaggtggagagcgcaatcacctgatacccttcatcgagaatgcgatttaccaccccggcaaaggctttttcatacgcttgttgagtggtgccgagacgtttgtcgaacggtgccagttcgcgcagggtaattgccaccgttttctgttgtgcggcaacgtccagccagtgttgaacagcatagctggcggtgaagtcttctgtgtggtgatcgaccagccacgcggtatcgacgccatgttccacttttgcagtggtgatattgctgcgtttcatcagatcaaggctgaccgattcgcgcaggatcagcgcgtcacagtgaccaaaaacgtagttcgccagttggttaaattgctcatcctggaaggggccgacgctgtgaccaatcataaacagcggctttttcgccataaacgtgcaaagcgcatgttcaaactgcggcacgccgtagagatcgacaaaaaacgatcctccgacctggataatggcgtcgtaacctgacagcaggcgcacgaagtcggtgaatccctgggcgatggcgatattacgcagcttgccagtgtcggtgacgcgcgagagcagtacctggtgctggtagcggcgacggaggacttttttaacgcgcccgacaacgcccgccgcgctgttgtgttgtttcatttgaaggaacagcggatcacccattaccgggcggttgagcagccaggaagaactgaccggatagcggctcatcacgtccacttcggcttgtggattgaggatgttgatggcatcaagtaagccgcgcaggatggcgctgtcgccacgattgccgcaagtgtggttgcccagaataagtaatttcattttttcctcataaatttgatgccaggtgaggctgcgtttgttttgttcgttgccgctttttgcctgatgcgacgctgacgcctcttatcaggcctacaagatccaagcacagaaccgtaggccggataaggcgttcacgccgcatccggcattcagtgcctgatgcgacgctgacgcgtcttatcaggcctacaggtcctacaggtcccgagcacagaaccgtaggatggataaggcgttttacgccgcatccggcaaccgttgtcggaaccgaaaacagcaactcaccccgcccgtaaaagcattttcattttttcgctgcgacaaaactgacgcttcacttccaccaccagcggatggcgcgacagcacaatcatcaccacaaacgccagcacgcccgcggctatttgcaccgccagcagcatccccagcgccagttgccctttcagcacaatgcccagcgcataactaaccaccagcgtcggcagcgagagataaaacggcagccacaaactcaggatgtactggcgataactggaaccgagcaccggtttaatcatcacgaagtaactcagaatggtgttgataatctgcaccagcaggaaaccgagcgtgacgccgattgcgcccgccatctgcccaccaataacaatcgccggaataaacagaaaggttttgaatacgttgaatttaaaactgatatcgacccgcgctttcgccatcagcagcgaaccaatcgggttacccacggagcgcagtagccccaccacacacagcaattgcagcaccggaataatgctgttccacttctcaccaaagaccagtggtacaaagttattcgacaccaccatcagccccagcagcgccggaaagttgataatccccaccaccgacagcagcttgtagaagttaatgcgcagcttttcggtgtcgtcctgaattttggcgaatgccggaaataacacgcgggtgatgatggggttcagcttcatcggcggcacaacggccacgttgtaagccaggttgtagccccctgccacgcccgcgccgagaatacgcgccagcaccagcgttgaaaggttggtgttgagatagttgatgatgctgtccgccgtcagccatgcaccaaagcgtaagttcggtgccaccgacgccagcgagaaatgcagaccggggcgataaattttgcgtccaaagtagccaaacagcagcgttctcaccgcactattgaccagataaccgaggatcgcggtcatcgccagcggccagaaatgggcgctaaccaccgtaaaagtgaagcccgccagcaccgcgctggtttcgatcatgccgattttgttgaactccagctccttctgcatcaacgcgcggaactgttgcccgtgggggatcaccacaaacgccagcgacaatgttttaatcaacggtgccaggtccgggttattcagcacgtcgccaatggcatcactcaacaaaaacaccgccacgcacaccacaagccccagcccgacgttcagccagtacagcgtggtgagttcaaggtggctgatttcttttcgctgaataatcgagttagcgataccgaagtcagaaagcgtatctgccagcgcgatgatcaccagcgacacggtaagcaaaccgaactggtggttgtcgataatccgcgccagcacggtcatctgtaccagcccgaggccgatgatgatcaccgtggcaatcgccgaccacttcgcgccgctgatggttttttcacgtaagctcatatcaatatgccgctttgttaacgaagcctttgaataccgtcaggaaaacgattttgatatcgaaccagacgctccattcgcggatgtactcaaggtcgaactcgacgcgtttttccattttctccagtgtgtcggtttcgccgcgccagccgttaatctgcgcccagccggtaatgcccggtttcaccttatggcgcagcatgtagccttcaatgagctgtcgatactgttcgttatgcgctactgcgtgcggacgtggcccgacaatcgacatcccgccggtcagcacattgataaactgcggcagttcatccagcgaggtgcggcgcagaaagttccccactttggtgacgcgcggatcgttctgcgtcgcctgagtcaccactttgtcgttctccatcactttcatggaacggaacttccacactttgatcggtttaccatccatgccatagcgagtctggcggaaaataaccggtcctggtgaactgagttttaccgccagcgcaatacagcacagtaccggggagatcagcagcagaataagcgtcgccagcacaatgtcttccgcacgttttatcaggcggttaaccccggaaagcggcgtgtcatacagcggcaccaccggaacgccgttcatctcttcgagacgtgaatggagaatgttgaaggtaaagacatcggggatcagcagcaccgaacaggtggtgtccgccagttgatggaccagttttttcactcgcgcgccgtcgcacatttgcatcgcgatatagacgttatgaatcttgcccgctttcgcatcctcgaccagctgttgcagattacccgcccagtcgttagaaacgccgcccggtttcgggtcgtggtaaacccccaccacttcaaaccctaaccacggctgattacggaagctctccatcagcatttgtccggcggctaaatcccccgccaccgcgaccatccgcttgttatagccatgattacgcagccagcccgcaccaatacgaatacatgaacggcaaaccaccagtccgatgctggtcagcccataccacgccagccagattttcagttgcgtgtcgaaatcattattgaacgccaccagtccggcgctgaaaatcacgcttaaggtccagttttgtagcaacagggcaaattctgtcgctgcccgaacaccgcgccatgagcgataaaaatcggtgatgccgcccagcatctggaacaccaccagcgtaatcagcgccaccaacaggtgcatgtagaggaatgacagtccgctcacttcgcaaaccagccatagcccggcaaacatgatggtgatatctgaaaagcgttgcaccatagagattaacgatgcattggttttcgctcgctcgcgcttttttagatttgtcatcgttgttcctgttattagccccttacccgcagtggggtaagggaagatccgacattactcgttcagcaacgtcagcagagttcgcgttcgcgcttccatcagcggcacatcaccgcgcgattccacattcaggcgcaccaccggttcggtgttggaggagcgcaggttaaaacgccagtcggcaaaggtcatgctgatgccatcggtgcgatccaccgccagcgcctcacggctaaaatgctgttccacgcggttaatcgcctcaacgggttgcgccagtttgctgttgatctcaccgcttgccggaaacgccgccatccggtcgcgcaccagttcgcccagcgttttctctttcaggcataccagttcggctaccagcaaccacgggatcatgccgctgtcgcagtaagcgaaatcacggaagtaatggtgggcgctcatttcgccaccgtagatggcgtcctccttgcgcatacgttctttaataaaggcgtgtccggttttcgacattaccggcgtaccacctgcggcagtcaccacatcaacggtattccaggagagacgtggatcgtggatgatcttcgcgccgggatttttttcgaggaacgcttctgccagcaggccgacaatgtaatagccctcgataaactgccctttttcgtcaaacaggaaacagcggtcaaaatcgccatcaaaggcaatgcccatatccgcgccgtgtttgatgaccgcattgcgggtgtcgtcgcgacattccggcagcagcgggttaggaataccgttggggaaattgccgtccggcgtgttgtgtactttgattaattccacgggcgcgccgagggctttaaagcgggcttcaatggcgtccactaccggacccgccgcgccgttcccggagttgatcaccagcttgagcggcgtgaggtttttgacgttgatataaccgaacaggtgatcaacgtaagcgccacgcagattgatttgctgatagcgaccgcgtttggttgcatcaacgggaggaaagtcgttggcttctgccagacgctggacatcgcgcagtccggtatcaccgctgatcgggcgagccccttcgcgcaccagtttcatgccgttgtaatccatcggattatggctggcagtaacttcaatgccgccatccacaccgagatggaacgtggcgaaatagatctcttcggtgccggacatgccaatatccagcacatcgacgcccgcatcctgcaaaccttttgccagcgccagttttaaggtttcgctggtgaggcggacatcaccgcctaacacaatggttttcggtttgagaaattcgccataggcacgcccaatacgccaggcaatatcttcattcagttcttcgcctaatttcccgcgaatatcataggctttaaagcaggttaattttttcatatcgttaccctttttcaggcaatagttggccctgaccgaagcggccaattttgtttttgtcgttatttacatcgcggtttcgcattcattgcctgatgcgacgctgccgcgtcttatcaggcctacaaaaccgaaccgtaggttggataaggcgttcacgccgcatccgacaaacagcgcctgatgcgacgctgccgcgtcttatcaggcctacaaatccgaaccgtaggtcggataaggcgttcacgccgcatccgacaaacagcgactgatgcgacgctgccgcgtcttatcaggcctacaaaaccgaaccgtaggttggataaggcgttcacgccgcatccgacaaacagcgcctgatgcgacgtttacacccgtccgtagcgatccgcgaagcgcaccacatcatcctcttcaagataagagccggagcgcacttcaattaaatcgagcggaattttccccgggttttccaggcaatgcgtcgcccccagcggaatataaatggactcgttttcaccaagcagtttgatatcaccgtcgatagtgacttttgccgttcccgcgacaaccacccagtgttccgcgcggtgatggtgcatctgtaccgacaagccctcgcccggtttcacggtgatgcgtttcacctggtagcggtcgcccgcgtcgatagagtcatatttgccccacggacgatacacttcgcgatgcacccgatgctcatggcgaccatcggctttgatctgctcgaccacttttttcacatcctgcaccgcgttacggtcagcaatcagcaccgcatctttggtctgcactaccaccaaatctttcaccccgacggtggtgaccaggccagattcggcatacacatagctgttttcggttttgtgattaatcacatcgccgtggcaaacattgccctcggcggtgtgggcgctgatctcccataaagaggaccaggaaccgacatcactccagcccgcatccatcggcaccacaacggcatctgccgtacgttccatgacggcgtaatccaccgactcttccgggcaggcgagaaacgcatcttcatccacacgaataaaatcgagatccggatcgacggcgctcatcgctttttcacaggcatcgagaatatccggacgatattttttcagttcttcgagatagcgtccggcgcggaacaggaacataccgctgttccagtaatattcgccgcttgccacataggcctgggcggtttccagattcggtttttcgacaaactgcgccacttcaaaggccaccgtatcctgctcacccgcagacacttcaccgcgacgaatatagccataaccggtttctggtagatccggcacaatgccaaaggtcaccagcttgcccgcttcggcatacggcatggcgttacgtacggcggcgcggaacgcgtcttcatcggcaatcacatgatccgccgccaataccaacattaacgggtcgctctccgggctatgacgttttgccgccagcgccgccagtgcaatggcaggtgcagtgttacgccctgccggttcgagaataatgttctcggtgagtttgttcagttgacgcagttgttccgcgacaataaagcggtgctgctcattgcaaatcaccaccgggctttcgcactccacgccgttcaggcggcagatggtggtttgcagcatggtgagatcgcctttcaggcataaaaactgcttggggtaaagtacgcgggaaagcggccataagcggctaccggagccacctgccatcacaactggatagagtttcgactgcgccataattatccccgaatatcatttataaattgacgtaacacgttctctttatcgagcgtgcgttcggcatattcacgtgccaccgtgttgtgtttgggcagcaggagcgcctgacgaatccccgccaccagagcctcgaccgattccggttctatgcaaaccgcaatgcccggaaaggtttcgcaaagctgccccagttctgtgtgggcttctgcggtaatcaccgcgttaccgcctaccgccagaatattggtcagtttcgacggcaatacggcatctgccgcgccgcgtttttgcaccaccagatggcaatcgcccatcttcagcagtgcgggtaaagcgtcatacgattgcagcgggaaaaattgcatgttgcgcagtccacgctgctgcgccattttttccagccgcgctttgccgccgccctgcccgacaatggcaaaaatcagcggttcatcgcgcaggcgatcggcagcttcaataacgttttccagtccctgcttttcaccaatattgccggagtaaagaatgatttttttgttatccggcaggccaagctggttacgaagggcgtcaacatcggcatctgcaacatgctgaaaacgggcaatttccgaccagttggggaagaaaatgacgttttccgccgccacgcctttttcgacagctttattcatcatcgaacgcgaaatcgtggagacgttatcgacgttatgcagtccgctacgttcgaacgccgttgccagctgtgccactttgccgcctttgccttttccggcaaggcccagccccagcatggcgtccacttcgtaatcctgaatatgcagcacggtacgcgcgccagagagtttcgccagcagacgcattcccggcgtgcaaaacagcgttggcactacgccgataatgcgctccggcttccagcgacgttgcgccatcagcgggaaaaaactgctgacggcaaaactgccgagatgcaacaggcgtttcagggtgctcggctgttttggcacgtacagcgggcagcgccacgccgtggcggccccctcttctcgtttgtaccgccaggcggaatagttctcgcccacctgccactgcgggtagtaaggcggtgcggtaataacccgcacctcatgaccttgtgccgccagccattccaccatctcgccggtgtatttgccgatgccggttaactccggcgagtagttaatgccgtagaccagtattttcataatccgggtactccggcacgcttctcagcgagaaaataggcgcggctgttagcgtgaacatcgttactggcgagcagcgcgtccggcgtcagccagcggtaatcgtcatgctgctcatccggcagtaacagatcttcttcagcgactctgaagcgaaaaccgagcaccacatagtgagtggtgaaatccgtgccggagaagttatcgtcataaaagtgctgccagacaccgtaaaactggcctgctgttatcggcagacgcagccccagttccgcaatcgtcagccgctcaaatgcggcttccagcgtttcgtctttctgcacgcgccctcccggcacaaaccagtaaccctgcgccgggcggttggttcttttgccaagcagaaactcgccgcgactgttctcgacaataaagtcgagagagacaagcggtgtggagcgcactaccgtggcaaagtcttcctgacgtaaaaacatcattacccccgaaagcggtcttgattctcaaggaaccactggtaagtgctggcaagccccgcttccagtgagatttcgtgataccagccaagctgatgcaggcgcgtcacatccagcagtttgcgcggcgtgccatccggtttactggcgtcaaaaaccacccgacctttgtaacccaccactttggcgatggtttgcgccagttcacagatggtgcagtcaacgcccgtgccgacgttaatgtgcgacaacatcggctgggtgttttccagccagacttcgtgcgccagctccatcacatgaatgcttgccgccgccatatcatcgacgtgcagaaattcacgcatcggtgtaccgctgccccacaccaccacgtccggtgcattctgtgccgtcgcctcgtggaagcgacgcagcaatgctgggatcacatgcgagttactcggatggaagttgtcgtgtggcccgtacaggttggttggcatgaccgagcggtaatcgcgtccatactggcggttgtaagattcgcacagtttgatcccggcgattttggcaatggcataaggctcgttggtcggctccagcgtaccctgcaacagctcgctttctgccatcggctgttttgccagtttcgggtaaatgcaggacgatccaagaaacagcagtttgttcacgtcgttctgatgcgcggcgtgaatgatgttgctctcaatcatcatgttctggtagatgaaatccgccggataggtgttgttggcaacaatgccgcccactttcgccgccgccagatagacctggtcaatgctttcgctggcaaagaaatcatgcaccgcgcggctgtccagcaggttcagttcatcgcgggtacgtaataccagctccacatcaccgcgctgttcgagctgccgcttgatggcagaaccgaccatcccgcgatgaccagcgataaaaatgcgttgtttactcatgcttatgactccagcgcgatcgccacgtcgtagccgtgagatttcagcagagagtgttttttcgccgcttcgaggtcattagccaccatttcagacaccatctctctgagggtgatttccggtttccagcccagtttttcgtgcgctttggtcgggtcgccgagcagcgtttcaacttcagccggacggaagtaacgcggatcaacggcgataatcacatcacccggtttaacgcccggcgcgtcatgcccggtgacggaaaccacaatgcccttctcttcaacacccgtgccttcaaagcgcagtttgatgcccagctgtgctgccgccatttccacgaactgacgtacggagtactgaacgccggtcgcgataacgaaatcttctggctgttcctgttgcagcatcatccactgcatttttacgtagtctttggcatggccccagtcacgcagggaatccatattgccgaggtacaggcacgactccagcccctgggcgatgttggcgattgcgcgggtgattttgcgggtaacgaaggtttcgccgcggcgcggggattcatggttgaagagaataccgttacaagcgtacatgccgtaggattcgcggtagttaacggtgatccagtaggcgtacagtttggcgaccgcatacggagatcgcgggtagaacggcgtggtttctttctgcggaatttcctgcaccagaccgtacagttcagaggtggaagcctgatagaaacgggttttcttttccagaccgaggaagcggatcgcctccagcaggcgcagcgtacccatcgcgtcgacgtcagcggtatattccggtgactcaaaagaaaccgcaacgtggctcattgcgcccaggttgtacacttcatccggctgcacttcacgcaaaatgcgcgtcaggttggaggtatcactcaggtcgccataatgcagatggaatttcgggttgcaggtgtgcggatcctgataaatgtgatccacgcgctcggtgttgaatgacgatgcacgacgcttaataccatgcacctcgtaacctttttccagcagaaactctgccaggtaagaaccgtcttgtccggttacaccggtgatgagagcgacttttgacatgtcttattcctctgtattttttgaatttattcagtttcaacgcgttcgcgtatcaccactgcgggattcccccggcaaaccacatttgccggaagcgatttaaaaacactgcttcgtgcacccacgacggtgtcgtcgccgatcgtgacgccaggggcaacaaaaacatctgtcgccagccagcatttctcgccaatcacaataggcgtggcgttaatggtgaaatgttgacttgcatggtcgtggctaccggtgcataaataacttttttgcgatatcaccgaatgtgcgccaatggttatttcaccgagggtatataaattgacgtcatcgccgacccacgcgtaatcacctaaggttaatttccacggataggtaatttttactgacggacgaataactacgtttttcctatttttgcgccgaataaacgtaataaaaaagcccgccagcgatacaatacttgtggcgaccaggcaaatattgttgcctgtactgcccaccataattgcactttaatagcgttgccgccccggaaccctttcggcaccgagaaaccgcttaaatcttgcatcgttttcccttatattcagcttttgttatataaggctttcgtctttgaggtagtacgttggcgtaaatgccaggataattctgcccagaagccaggcacatgtaatatctgccgttggacttttttggcgtcagcacacaattccatattattggtggttgataccccacccatagaaaattcagacaccaggccattgagttttttaaatgcataaccggctttatacattttggctgccagcgcgtaatcagaagaaactttatattcaaggtcataacgccattttttcaaaccggataccgggaaaaatatcgcctgatggctggcgggcaggctgtgataaatataccaacccggtttagcactacgcttaattttatgcccgtcgccaaaatccagcagcgcatcgccggtgatcatcacgttatctttttgcatttttaacttacggacaaaatttgcggcatcctgatgaaaaatatcgcccgagttgagaaacaacgcgaacttgccttgtgccatcgcaatgcctttgttcatggcgtcgtagataccgttatctggctcgctgacaaagcgtaggttaaagataccattgagattttccagatactcacgggtgccgtcgttggaaccgccatcgacaacaatccattcgaagctgatatcttccgcctgcgccagatgcgccagcgaggcatgtgttttgactatcccttcgaggttacgaaacgcgacagtgattatgctaagcaacatgttcttattcttacctcgtaatatttaacgcttttcgcaaaataaacggacagacgattaaaaatacatattccgggctaaatatcgaaccggtaaaaaacagcgataccggagtgaaaagatataattgcacgcgaaaattgcggttatcaccaaaagcgttgatcatcatttttatcactttccccatgtaccacagcgataaaaacactgcgaaccaggaaaaataaataatcagcagatacaaaccattgtctatggtttttccgacatccgcaccgttaaatattccgaatgatgcgacatactcataaagtgagccaaatctgactacaccgtcaatatgggtcaaagaataaccgaccatcaccagcggaccgacaatacgataatatgatgacgatccttccgtacctaaatcgcccagacgggtggaaatataaggaaacgcgattaccacaccaaccaggaatacagccagagaaatcaatgctaacggtaactttttcttaatcgcctctttattcagatattgaaatgcccactccagcaaataaaacaggataaaggtcataacccctgaaaacgatccggataatattatccctgcgagaatcatagcatctgttttaggcgttttgataccaaactgtttgatactgagccaaattgagattaatgccagagcgaaaaatgccggttcgaaataaagtgctgtcgtgcgcttgccgccgaatttaatgaaattcagcacatagctgttgctgtaaatcagatatttcgaaatcgactccataatactgctgccaccggtgaggataatttgcgccatctccaccgccgccagcgccaccaccagcccgaccaccagataaaagaaacgtaatatcttgcgatggttgtgtggcgaaattgttttaaaacgaatactccacaccatgccaataatgatcacaatatagacaaacagcatagttgaagtgacgtatttaccggcatccaacgactgaccaaacaggtagttaaacgccgtgagtcccgcaccaacccctaaggcaatcatcaattttttaacgctgatgcgctctaaaaacagcagtaacaagacaggtaaaaaagtgacgatggtgatggggaaactttcgccaagctgggcgattttgacgttaaccagcaggtaaatcagcggcagcaacaggtagctacagattctgatagaagttgacatactcctccagcatctgttgtccactgtaggccgcgcggctgcgttggctgaactcagccagcgtggtaccaaatatcgcctgcgcgatttccggtttgcttaactgcaccagttgcagcacctcttcttcactgacggttttaccaccggatttttgcagcacttcccgcgccgcatcgctatgggtggcgatcaccggcacaccaatcgatagcgcctcacacaaaatcagcgggtagttatcgacgcgagaactgaacaccagcgcatccatctgattgagcgcgctcatcaacttgcgcttgtcagtttcaaagccgtgattaaccacgttgccagcggtgaacggcgagaacttaccaaaggtatgcagttcgattttgtcgcccagcgccatcatctcacgcaccagttgctggttagttttgccgtcgtaacgcaggtcatgcgccaccaccgcgattttcggcttgccctgagtttcgcgcaccggaggcaagtccgccagaatcgcttcggttgccatatcaatgccattattgataatccggcaacgccctggcccgtacagactattgaaagcgtcagccacatgctggctgggggaaataaactgacagcccagcgccagcatctcgcggaataactgccgtttgcccgccaccagctggtgcgcgcgatcaatcttcaccggcggatagttatttaaggtcgggcatttctggcagcccgttttccagccttcgcaaccgtcagtaaaggcgcagcgcccggtaacgctccagtggtcgtgcagcgtccagaccagagtgacatccggtttgtggtttttcaccttttcgcaaaagcgcaccacgctcttaagatttagccagtagctgtgcagcacatgaaaatgcaggaccaccggacccggtgtgcaagtaatggtgcgatataactcattgaaattgccaaacagatcgcgattaaacagacgaaacaacgcaatgttcgccatcgcggtcatccgcggcgtatgtttgacgacctgcggatagttttgatggctgacgctctctttgccgcctttgccgtagccgtagacaaaatgtgacgccagcccctgttgcagcgcacgctgatggagatctaacgccacacctgccgccccgccttccgccagtcgcacattaaattgcagaatattcatttaattaccttcactcgcgctttttctcccaccaccagcgcgttgtccgggacagagtcgagcaccacgctgcccgcgcccacggtgacgttgttaccaagcgtgatatcaccaagaataatgacgttggcaccgagttcgacgccgttgccaatgtgtggacatgccatgttatcggcaccacgattgccgatagtgacgccgtggcgaatggtgaaatcatcccccgctaccacgtttttattgatcactacggcgtaaccgtgatggatagtaaagcggcggccaatggtcgcggcggcctggatttcataaccgaaaaagcattcggtgataatgcgatacagcaccagcagcggggccgcccacagattgttgaggacgttctttttgcgccacaccgaacaaaaatgagcaacacgataggcaagaaccatgcagcacgggcgtaaactccagctgttggcacgcagatcttccagcatctttagcgcccccgaataccatcagccagacgtttgccgttacgcaccgacagcagcgtcagcaaagtgcgccaggtcatacgtttattgcggatctggtagagggtaaacagctgatattttttgcttgcacggtcaaatttatctttgtgcttgcggtaaaagtggaagtacccggagaattttttcggtgacgaggtgatctgcatttcaccgtgattgatatgcaggatctgcgtcgcctcttccactttccacggttcgccatactccaccaccatccgcaggaagatgtcgtaatcctgtgctgctttcagttcggtatcgaacaagcactctttgaaacgccacgcccaggtaaaaacctgattgccaatgatattgcgtttatagaacaggcggcgtgagtacggcgatttgggatacagtggtaagcttgctggttgggaataaacttctccctggcatacgtagtcgttagcgtacaaaaaggcgtgagtgaccagttgctgtttatgggcgaggaagacgctcaggcggttgggcgtccattcatcatcgtcatcgatcccggtaatgtattccccttgcgccagcataatcgcctggttacgtaccgcgcacgccccgctgttaatgtcgttgtgaatgtaggtaatacgcggatcgttgagggcagtgacgtactgttgcagttgttcccaggaggtggagcaatcatccacgatgatcatctcccagttgctgtagtcctggcgcaggaccgattttatcgcccgaatcgccagttgttggcggttccaggtcggcatatagattgaaatcagcggattgtctttcataggttgttctcccggagtgtcgagatgttctgccggtttataagcttgtttacgggttctgttgccggatgcggcgtgagcgccttatccggcctacggagctggtttgcttgccggatgcggcgtgaaggtaggtcggataagatgcgtcagcatcgcatccgacagcggatgtcgttatttcgcatccgacttatattcgtattcgtaatagccataatcctgatacgcgctggcgcggcggaagatggagttcagaatcacccctttcaccggaataccgttttgctcaaagcggctcagactggtttccacttctttcaatgtgttgaccgcataacgcgccaccattaacgtggttccgacatgacgaccaacaattgcggcatcggtcactgccagaatcggcggcgtatcaatcaacaccaggtcatagtttttactcgcccagttcaccagttcggcaaagcgttcgctcatcaacagctcagaaggatttggcggcacctgaccgcgcgggatcaggtcaaatttggcaatagaggtcggtttagcagcggtagtaatatcgccctgaccaatcagaatttccgacagaccattgacgttattggtgcccaacagctcgtgggtgtagcctttgcgcatatcacagtcgatcaacaacacccgtttattggtctggctgatcaccgccgccaggttggcgcagacaaaggttttaccaattgacgggctaaccccggtcatcatcaacacattgttctgcgcctgcatcatcgcgaagtgcagactggtacgcagactacggatggcttcaatcgccagatcggttggattccccactgccagtagctggctctgtttatagcgtttaacccctttgatggttttgacgctatcgcgcgctttctgccactccgacagcgggatgctggcatagacgctgataccgtgttcttccagcacctgcgggctttcgatgccgcgattaaacaacgagcgcagcagcacacccacgatagagagcatcaggccaagaataatcgccccaaggataatcagccctttcttcggtttcagtacacctggctgggtgattgccgggtcaacaatgcgcacatcgccgacggtgctggcttcggtgattttcagctcctgctctttattcagcagttgcatatagacctgctgaccagactcgacatcgcgggtcaggcgcacaatctcctgctgggttttcggcatcgccgttacgcgaccattaagtttggctttttcgtcttccagcgcctgacgtttctccagcagcgtgcggtacgcggggtgaactttggtgtacagcttggagatttccgcctctttaaaggtcagttcgttcaactgcgcgtcgatgttcaccatcgaatcgagcaccgctttcgcttccagcggcagatcaacagaatctttatcctgacggaaggcattcagtttgttttcggcaacatcgaggcggctacgtacttccggtaactgttgcgcgaggaaagcgaggcttttcgacgcttccgccgatttgcgctcaatattttgttcctgatagttacgggcgatgctgttaagaatgtcgcggatctgttcgcgatcttcaccggtataagtcaggctcagtacgcctgcgtctttgccgttctccgttaccgtcaggctgttttgcagttggttgatcatccccaacgtggagtatttggtgacggtaaactcactgcccgggcgggcgtgaatggcttcaaccatcagcgtgacgccttcttttttcagcatctggcccgcttgcccacgggcgctaaagccgccatcactgctcagagtgtagtttttgtcatccagcacattaagcgtaaacacctggtccgccatctctttcgggcggttaaaggtggtcactttcaccgtctcgttctgacgtcccatcaggcgatcccaacccgcaccgaaaatcgggaacgtgtttttgctcaccgcaatatcgaggtctagatcgtccaccgttttaccaagcaccagacgcgaacgaatcaactggatctcggcgtccgatgcaggcggtttgttggctaatgccgagccaatgtcctgcactaacgaattgccgctgttttgttcgatttgtaccagtgcgtcggcactataaatcggcgtggcgaagaaagtgtaaaccacagcacagagggcaaatacagcggtgatgccaatcacccaccagcgcgcttcaatgacggtgccgaccaggcgaccaatatcgatttcatcactgcccgttaccggagcggcatgttgttttactttttctgtcattcttatacctgctctgcgttcaatgcctgcgcccactggcgggcagaccgttcaagtaatgtgtacaccgctgcaaacgtttcccggcttttgcgatacggatcggggatttcacattcgttatcccagtgaccaaacagcatcactttgccgcgcatctcaggtgccatctcgcataagcgttcgatatggcgcttttccatggtcaaaatcaggtcatagttgcgacacaggcggcggctgatttgccgtgcacagtgaccttccagagacagttgatgttctgcggcgacgctgatagcggtaggatctgcgcccttaccgaccagcgcgccgagtccagcggactccactttcagttccgggtgataacgttgcagtaagcgttccgccgtcggggaacggcaaatattgccgacacagacaactaagatgttgttaaacatgacgattaccagttatgaatgtcgctggctgtatccgtcatgtaacggacaccgctaatagttggcagcaactgattgatcagacggttccagcgggaaaccggggcggtggtgacatacaccacgtcataaggttgcaggcggaattctgtcgccatcaccagcgacgtggcatcggacatatccagctggtagatattggcaatcttgccgttacgcccgccctcgcctttcaacggacgaatgacaaagatgccgctggcgttggaggtggtcatgtcgataccttcagcattgcccagggcttcagtcagggtcataccgctaaagtccattttcagggtgctctgtttcttcacttcacccatcacaaatactttcagatcatcattacgcggcacgtagagaatatcgccggggtaaagcagtcggttctgattgaggtcgccgttttgcatcagcgcctgcaaagaaatgcgttcttcacgaccattgtgtgttagcaccacgttgcgccagtcagcggtgtcggtcaggccacctgcggcgttgatggcatcgagaatggtcagtggtacgttggtaatcgcctgttgaccggatttattcacctgacctgagatataggccttttgtgagcggaaggcggcgatattaacgtccacctgcgggtcagcgatgtacgttgctaagcgcccggtaatatcactgcggatttcagcgagcgttttccccactacgtgaaccttgccgatatacggataaaacatagtgccgtcaggctgtacccagttgccggtgtcgctggagctgcggtactgaccggctggcgtggtgagttccgggtgatcccagacggtgacattaagaacgtcccccggcccgacgcgatactgataattcgcgatctcgctttccagcgtcatattggggcgcgctacattcgggcgtgggcgtaattggtcaatcaggcgcggggtcagcggataaacattcaccattttgtcgagatcgaaatcagcgtcctgctgtttgatgacgtctttgcccatcgtcgacatattgctgcccggaagtactgtgcaaccgcttatcaaggttactgacaccaataatggcatcaatttcattttggatttcatcattgtttatttatcactttggcagagtaattatcctgtgcactattaatagcaatgtcgccatgcacatttaccttgcagttaattgaatacaaatttaactggcatcagtcctaaaaaaattgatttcatccgcaggctattgacagaataattcagactggtctttcaggcatccagacacgctaccgcccctggctttttagctaccaatacactgatttagcttaatttttcaaaccctctctgcatacaattgttgatgagaaagggttattgcggaaattaacttccgaatataaggtgacattatggtaattgaatattggctctccaataatgcaggaggaagtgttacagctaacggaatagcaggcaaggtaacaattcggcaattggctatttttaagaattatattaagtgtcattcaatatggtttttaggagtttctttaggttgacaatatttaatattgcgcctccacatgcgatatttcttaaataatgttttattattaccacttttaattcagggataatgtgaggttattaccctcaaataatatgagataaatagtgctgcaacattgcatttttgccccgatttatccatgatcgaattgtgacatttgtcatacaacgaataggttttgtacttactatggaatggattgccgatccgtctatctgggccgggttaatcacgctgattgtgatcgaactggtcctcggcattgataacctggtctttattgccatcctcgccgaaaaactaccgccgaagcagcgcgaccgcgcacgggttaccgggctgctgctggcgatgttaatgcgcctgttactgctggcgtcaatctcctggctggtcaccctgacgcaaccgctgttcagcttccgctcgtttacctttagcgcccgcgacttaatcatgctgtttggtggtttcttcctgttgttcaaagccacgatggagctgaacgaacggctggaagggaaagacagcaataatcccacacaacgcaaaggtgcgaagttctggggggtggtgacacaaattgtggtactggacgccatcttctcactcgactcagtgattaccgccgtcgggatggtcgaccatttactggtcatgatggccgccgtggttatcgctatcagcctgatgttgatggccagcaagccgttaacgcaatttgttaacagtcacccgaccatcgttattctctgcttaagcttcctgttgatgattggctttagcctggtggcagaaggtttcggcttcgtcattccgaaaggctacctgtacgctgccattggtttctcggtgatgatcgaggcgctcaatcagttggctatctttaaccggcgacgttttctttccgctaaccagacgctacgccagcggactaccgaagcggtaatgcgcctgcttagcgggcaaaaagaagatgcggaactggacgccgaaaccgcgtccatgctggtggatcatggtaaccagcagatctttaatccgcaggaacggcggatgattgagcgggtacttaatcttaaccagcgtactgtcagcagcattatgacgtcgcgccacgatattgagcatatcgatctcaacgcgccggaagacgagatccgccagttgctggagcgaaatcagcatacgcggctggtggttaccgacggtgatgacgcagaagatttgctcggtgttgttcacgttatcgacctgctacaacagtcactgcgtggcgaaccgctcaacctgcgggtgttgattcgccagccgctggtgttcccggaaaccttgccgttgttacctgccctggagcagttccgtaatgcccgcacgcactttgcttttgtggtggatgagtttggctcggtggaagggattgtgacattaagtgacgtcactgaaaccattgccggtaacttaccgaacgaagtggaagagatcgacgcccgccatgatattcagaagaatgcggacggttcctggacggcgaatggtcatatgccgctggaagatctggtgcaatatgtgccgctgccgctggatgaaaaacgtgaatatcacaccattgccgggctgttgatggaatatttacagcgtattccaaaacctggcgaagaagttcaggtgggggattatttgcttaaaacgttgcaggtggaaagccatcgcgtgcagaaggtgcagattattccgctgcataaggatggcgagttggagtacgaggtgtgatggtatcggtcattttacccgatagccgaaaggaataagatgagggaaccgcgccagcggcgatttaccgccgggagcccgggttgccagggtggtggcgattgagccaccctggcacgttcaccggcttgagcgttccatagtagtgaggaacatcaagtgaacggaacagccttcgatcttacatattcagaatataatggtgccgccgcgaacgcctgatgcgacgctttacgcgtcttatcaggcctacaggacaggtcacctggtaacctacatcttctccagcaacttcttcacatctttgccattgcgggaatctttattccgctcggcccagtcattcaggcgacgtttcgcttcgtcctgtagatgtttgcgcagtaactgatccacttgcagactgtaattgagttgctgccagttgccataaacccgcagcggtactggcgtttctttgaggaaatcaatcagtttgctttccccgttccagccacccacgacccgaatatcaaactgggtgtcgcaggtttgatctgccagattcaacatgccttcccctgtcagcgccagcacaggcgattgaccttgcatgtcgtttaacgtcacgacgccatccttcaacgtcaaatcggtggtaaagcggtcaagccgcgtcacgttatcaaagttttcagcggccttcacatcaccgccattacgctctaccgcttgctgaatcatctgctggaagttcatcccttccatgcgcgtgtcggtcattttgacatgtgcctgtccttgccagttgtggcggaatgcgtcggcatctatgtcagcaccggagaaatcaccagccagtgacatttttccggtcaacgaaatcggatagttaaacgccttcagaatggtaccaatctcaacgttttccagccgtggctggaagtttatccgcggatttattgatgtcgcgtccagcgtgcccggcagtgaaacctgtccaccgttaagcttgccctgcagttgagtaatttccagcaaacccgacttgttggtcatttgcgtggcaacatctgtaaaattcattccgcgccagcgcacgttactggcctgcaacaaaatatcagccgtaaagccttgcagtccctgatatgccggttcatcaatacgcgaagaaatgaccgggcgcggcaatgttgattggctctgcccctgctgcgcggcaccgttttcaccattcgctgtttcattaagcgggatgaggttgtcaagattcagttgcgggaattggcagtctcagctgccattcaggtttctctgtcagcgtgacctgtgcttgcccgctcagcgtgctgtcattggcggtcaagctgatttggttaaatgaaaggcgtttatgtgactcctgccactgggcctggaaactcccctgcccctgaataccttgttttggtaaatctgcaccctgcaactgccagttaatttgttcaatagccgccgttaaatcatgcggataatcagaagcatctaccgtaccgttaagggatatcgtgagatcgcgctgatcgcgattaacccgcccggagaactcaaatgagccacgatgttggggatcttgttccatttgcaggcgaatattgcggattgtcacctgctcgtcatcttcatgctggaacaccagcacgctgtccgccaccttaagactggatatatcaaacgaccatccgcgatcgtctgacagatccggcaaggtattgtcgcgcggtgcaaccggagcgtcttcactgcgcaccgcttccgtctgcggcgtcagttgaatcactgccccttttagcatcacctgcttaacgctcagttgatgactcagtagtggtaaaagcgccacgtccagacgcatgttgtcggcgcgaaccagtggctggcttgcgccctgggcggtgagagacattcgcccggagaggatactaagctgcggccagacgtgccaacgcagtggcccgtcgagctgcaattgataaccgctacgtgcagcaacttgcttgaccatatagtcgcggaaatcattcggattcaccagcaacactaacgcagataacccggccaccagcacgaccaggagtatcatcagcgtcgtcagaaatcgtctcatggtatcctcaatgggcctgaattagtctttatcgattcggctggctaccgcgccctgctggttgcgatatttcgcatcttcacggcggttgtaaggtcgcgccgccgggccggaaagcggctcaaagctcagcgcaccaattaacatgcccggacgcagcgccagcggcagcttaccggagttgtagaactccagcacaatgcaaccagaccagcccggatcgatacggtgcgcggtgacgtgcaccatcagccccagacgcgccaaagaggaacgcccgtccagccagcccaccagatcggctggcagcgtcaccgactccagcgtcaccgccagcgccagctctcctgggtgaagatagaacgcctcgccctcgtcgagaacgatctcatcgctcatcacgcggtcaagcgcggcgctcacttcatctttgggaccgctcagatcgataaacgctgccgtgtgaccacggaaggtacgaaatttattgcccaggcgtacatccaccgtcgcgccgttaatacgctccactggcggacgtgggttgatcgacaaacggccttcatcaagccaggcttcaatatctcggtcacacagacgcatggcattttctcctttcgcgcatcactcccttaacgccaattacgtcaagggcataccaggttatcactgaacggtacacaatttatcaagcttattcaaagaactgacttattttcgctttcaatatatcgatcgcgatgcggtttttcccgccgcgcggcacgataatgtccgcatattgtttagaaggctcaatgaattgcaggaacatcgggcgcacggttttttgatattgcgccatcacggaatccattgaacgcccacgctcgttaacgtcacgcttgatgcggcgcatcaggcagatatccagcggggtatcaacgaaaatggagaagttaagttcgtcacgcaaacgcgcatccgtcagcaacaaaatgccttcgagaatgatgaccttcttcggctcaaccgtcaccgtttctttcatacgcgtatgttcaacatagctgtaaaccggcaggtcaattgccgagccgcgtttcaacgcttgtaaatgctcaagcaacaggctgtgatccatcgcgctgggatggtcgtagttggtcttaacgcgttcttccatcgacagatggctttgatctttgtaatagcagtcttcgggaattacgccgatgtgttcatcaccgacttgctcacgtaattcacgataaagggtactggcaataagactcttgccggaagccgatgcgccagcgataccgataatgacgcactgatgagactgatcagtcatatatttagcgacctgattaacctggatgttaggaagggggcgacgaagcgccaaacgcggcaattatagggatttcatccgtctgataccagtcgaatagcgttgccgcgcgctcagagttaattgttgacaaagaattcccggtggcaaattacgttgatcagttttatgtaaggtaaaaaatgttatacgcagttgcgcaaattatccgcctttacgtcactttatgagcaattcgcatataaaatgtaaaacttttgtactagcataaacacagaaacgaatactggcgacctggtcttgcggataaagcggtaatgagcaaacaatcacagcatgtattaattgccctgccccacccgctgcttcacctggtcagtttaggtttagtctcgtttatctttacccttttctcgcttgagctttcgcagtttggcacccaactcgccccactgtggttcccgacgtccatcatgatggtggcgttttatcgccatgccgggcgcatgtggccgggaattgcgctgagctgctcgctgggaaatatcgccgcatccatcctgcttttttccaccagctcgctgaacatgacctggacgaccatcaatattgttgaagccgtggtcggggcagtgctgctacgtaaattgctgccgtggtataaccccttgcaaaatctggctgactggctgcgtctggcattcggcagcgccattgttccgcctctgctagggggtgttctggttgtcctgctgacgcccggagacgatcctctcagggcatttttgatatgggtactgtcagaatccatcggcgctctggcactggtgccgctgggattgttatttaaaccacactatctgctgcgccatcgcaacccacggttgctttttgagtcgctgctcacgttagccatcacactgacgttaagctggctttcgatgctgtatctgccgtggccttttactttcattattgtgctgttgatgtggagcgccgtgcgcctgccacgaatggaagcctttttgatcttccttaccacggtgatgatggtgtcgctgatgatggccgcggatccctccctgcttgctacgccgcgtacatacctgatgagccatatgccgtggctaccgtttttgctgatcctgctgcccgccaacatcatgaccatggtgatgtatgcctttcgtgcggaacgcaaacacatttccgaaagcgaaacccgctttcggaacgcgatggaatattccgccatcggcatggcattagtgggcaccgagggacaatggctgcaatccaacaaagcactctgccagtttctcggttacagtcaggaagagctgcgcggactcacctttcagcaactgacctggccggaggatctcaataaagatctccaacaggttgaaaagctggtaagcggtgaaataaacacctattcaatggaaaaacgctactacaaccgtaatggcgatgttgtctgggcgttgcttgccgtctcactggtgcgccacacggatggcacgccgctctattttatcgctcagattgaagacattaacgagctaaaacgcaccgaacaggtcaatcagcaactgatggaacgcatcacgctggctaacgaagcgggcgggattggcatctgggagtgggagttgaagccgaatatttttagctgggataagcggatgttcgagctgtatgaaattcctccgcatatcaaaccgaactggcaggtgtggtacgagtgcgtgctgccggaagatcgccagcatgccgaaaaagtgattcgtgattcgttgcaatcacgctcgccctttaagctggaatttcgcattgccgtgaaagatggcatccgccatatccgcgccctcgccaaccgggtactgaataaagaaggcgaagtcgaacgcctgctcggcattaatatggatatgactgaggttaaacagcttaacgaggcattgtttcaggaaaaagagcgcctgcacattacgctggactccatcggcgaagccgtggtctgtattgatatggcaatgaaaattacctttatgaatccagtggcggagaagatgagcggctggacgcaggaagaagcgttaggtgttccgctcctgacggtgttgcatattacttttggcgacaacggaccattaatggagaacatttacagtgctgacacctcacgttccgcgattgaacaagatgtggtgttgcactgccggagcggcggcagctacgacgtgcattacagtattacgccgttaagtactctggacggcagcaatataggctcggtactggtgattcaggacgtcaccgaatcacgcaaaatgctgcgccagctgagctacagcgcctcccatgatgcactgacgcatctcgccaaccgcgccagttttgagaaacaactacgcatcctgctgcaaacggtaaacagtacacatcagcgacatgccctggtgtttatcgatcttgatcgctttaaagcggtgaatgacagcgccgggcatgcggcgggtgacgctttactgcgcgaactggcgtcgttgatgctgagtatgctgcgctccagcgacgtgctggcgcgactcggtggggatgaatttggtctgctgctaccagactgtaatgttgaaagcgcgcgttttatcgctacacgcattatcagtgccgtgaatgactatcactttatatgggaaggccgtgtgcatcgtgtaggtgccagtgccgggattaccttgattgatgacaacaatcatcaggcggcagaagtgatgtcgcaggctgatatcgcctgttatgcctccaaaaatggtggacggggccgggtgacggtttacgaaccacagcaagctgccgcacatagcgaacgggcggcgatgtcgcttgatgaacagtggcggatgattaaagagaatcagttgatgatgatggcccacggtgtcgcttcgccgcggatcccggaagcgcgtaatttgtggctgatttcgcttaagctctggagttgcgaaggcgagattattgatgaacaaacatttcgtcgtagcttcagcgatccggcacttagccatgctcttgaccgacgggtattccacgaatttttccagctggccgcaaaagcggttgccagtaaaggcataagcatcgccctccccctttccgttgccggtttgagtagcgccacgctggtgaatgatctgcttgagcagctggaaaatagccctctaccaccacggttattacatctgattattccggctgaagcgattttcgatcacgcagaaagcgtgcaaaaactgcggctggcgggatgtcggatagtgctcagtcaggtgggccgcgatctgcaaatcttcaactcgctgaaagcgaatatggcagattacctgctacttgatggtgagttatgcgccaacgtgcagggtaatttgatggatgagatgctgattacgattattcaggggcacgctcagcgactcgggatgaaaaccatcgccgggccagtcgttttacccttagtgatggatacgctttctggcatcggcgtcgatctgatttatggtgaggtgattgccgatgcccaaccgctggatttgctggtgaatagtagttatttcgcgattaactgagggagcgtttgcccattgcctgatgcgacgcatcaggcctacaattcgtccgttccgtctggttgccagccttccgtataccagatatgcaacagcgcataagaacgccagggcttccagcgctcggcataacggcggatttgtgccggtgtcatccccggaaatcgctgtttaatcagataatcatccggcagaaaaacatctttcgcctgccagccacgcaaagcgaaataattcgccgtccagcgcccgatacccggaaaagtttgcagcgttttcatcgcctgctccacatcgcccggaattgtcattggtaagctgccctccagcgccgcatttgccagatgaatcagtgcctctgcccgtttcaacggcatgcctaacgcttttaatgcctgcgggtcggctgctgccagccgctgaggcgtggggaagcagatatactccggaaaatcatccagccgttcgccataaagctgtacaactttggcagtcaattttgccgccatcgccacgctcaccagttggcctaaaatcgcccgcacaccctgctcaaaagcatcaatacagccgggtaaacgcaatccgggccgcgccgcgcctaacttgcccaacgcaccgttaacaatctgcgggttacattgcagatcaaacaggcggctcattttcgccagacactcagcggcaacgggttctaaacctgcacttaaatttatgtgcagagtatggcgggctatatccggaatagcagtcaccacgccgcgatattcgcccaccgccagactacgggcataataactgtccgcgaccgtttccacaccgctcactgcacgggcggcgagaaatcccaacatccacgaccagtcatacggcggctgccagttcagggtatacatcgcatctccttattcatccgctttcagcataaacgttattcagacgctacgctttgctttcatattccggttgtcgcgacagcaacatttcgctaaagtcacgccccttcttcaccggcatggggattaattcgtgtttattggttttgattacggtacagcaaactgttcagtggcggtcatgcgtgacggtaaaccgcaattactgaaaatggaaaacgacagcacgctgctgccttcaatgctttgcgcgccaacgcgtgaatcggtaagcgaatggctgtaccgccatcatgatgttccggcagacgacgatgaaacgcaggcgctgttacgtcgggcgattcgttataaccgcgaagaagatattgatgttacggcgaaaagcgtgcagttcggtctttcctcactggcacagtacattgatgatccagaagaagtgtggtttgtgaaatcaccaaaatcgttcctcggtgccagcggcttaaaaccgcagcaggtagcgctgtttgaggatctggtctgcgcaatgatgttgcacattcgccagcaggcgcaggcgcagctgccagaagcgattactcaggcggtgattggtcgcccgatcaacttccaggggctgggcggcgatgaagcaaacgcccaggcgcaagggattctggaacgcgcggcgaagcgtgccggattcagggacgtggtattccagtacgagccggtcgcggctgggctggattacgaagccaccttgcaggaagaaaaacgggtgctggtggtggatatcggcggtggtacgactgactgttcattgctgctgatggggccgcagtggcgttcgcgtctcgatcgtgaagccagcctgctgggtcacagtggttgccgtattggcggtaacgatctggacatcgcactggcgtttaaaaacctgatgccgttactgggcatgggtggcgaaaccgaaaaaggcatcgccctgccgattctgccgtggtggaatgcggttgccatcaacgacgtacctgcgcagagtgatttctacagtagtgccaacggtcgtctgcttaacgatctggtacgcgatgcccgcgaaccggaaaaagtggctctgctacagaaagtctggcgtcagcgtttaagctatcgcctggtgcgtagcgcagaagagtgcaaaattgctctttcaagcgtagcggaaacccgcgcctcactgccgtttatcagcgatgaactggctacgctgattagccagcaagggctggaaagcgccctcagccagccactggcgcggattctggaacaggtgcaactggccctggataacgcccaggaaaaaccggacgttatctacctgaccggcggtagcgcccgttcgccgctgattaaaaaagcgctggcagaacagttgacgggaattccgattgcaggcggcgatgactttggctccgtcaccgccgggctggcacgctgggcggaagtggtgtttcgttaaaagaaaatggctcagcagcggcttaaatctgcctgcgcctgagccagtttttctgccgcctgacgtaaaggttccatcaacggcatggtccgtgctggagcatgaaggcggaatcgctgcaactctgtcgcgccgacagtcaacgtcgattccagccgatgtcgtttggcggtcattttcgccattaccgcttgtctgtctgctggcgttatcgcttcattcggcctgaacacaaaacggcgttcacagctcgctttccagtcgataaccgcctgggtcagatggtcgccaaaccctttcacttgcttaacgccacgacgggtaacatctgcggctgtttcaataccaaaagaccgtaacgccgctttacgcgcagggccaacgccgggaatagaggcaacatcaataaaaaatccctccagaaacttctgcttctgccgttcccttgcagtgtcatgaagtgctgccagagcgcgtttctcttcttccggtaacccgagaatttcgtccttcattttttcgagcatcgtccgtttggcgataaaaccttccaggccgcctacctgctggatctggcggactaaatggtcatagtccattttcgcacgattaaatgcctcacggcgttgctgaacttctgctttgtacgctttgcttgtcagactgccaataatccagatagccgccagcacaggaaccaaaataatataacgcggttctgcctgaaggccgcaaagcagcagcgataatgctgacagtgcgatctcaagcagaatgatgtattcgcgccgtaacaggcctaaaggaagcggcctgccagtcggttggaaatgatcgggtaatggcagttgcaatgctggcggtgctactgacgccatcaccatcgcccagacttttgccagcacaaaatccccgccggtggtaatgacctcttcgccgagatcaataaaatagataacgccttgattatccagcgcacaccacgggcagtcggtcaaatgagcgggataaacatgcattgccgaaacgggacatttctttaactgttggcgcagagaatcaagtgccgctacccacgctttagccgtcggacgcccggttgccacgccactttccgtgaatgcctgctgaaacatggcttcaacatcactcggtaacatcgatagcggaatcgatcgtggcggcggttttaaaccacgtcgctgattatctgacgcgtaggcataacggaaatgggtaatatccgtctccagcgcattacccgcatcagagataagcggcacaccagaataaggatgccggccaccaaacaagacgtgaaaaatcagcaacgcaaggccaaaattatcgtgattttctgtgcgttcaaagccgacaaatgacgacaaggtttgtagctctggcggcgtaaaatgcgacacgccgacttcgcataaatgcagtgtgccattggcgttaatctgaaaggagtcgctatcaatcagtaccactttgctgtcgcgacctaccataaaactgttctggtttacgtcacccacgacgtgcccgtgctcgtgaaccgtagcaaaagatgaagcaatattgcgcgcaacatagagtagaaaatcccacgcacaatgagggtaacgttgacgacgatgtgccgggctatagatcatatgaatcggttctttaccagaaacttttggcatcataaaaccgataacttttccgcctcgtccaccgtgaagcgttgcctgcggccaggcgacataattcaacaattgcgcgtcagctgtcgcagccataaaggcaagtttgtcctgttttaaggcgggtggcggcgtgtgataaatcttggcgacgctatcgacaaactcattgatatcataaaccgcgccttcaccgcctttgcccagttcacggcctggcgtaacgcactcaccagtagcagtatataaagtgggtttcatggtaaccacagcgccagtgccaacgttttatcatcatccgtacgctcgtttaccgccgggctggacaaaaactgctttaacaattcaggtaataaatcgagttgttcctgcgttgctgacgccagtccattgaaaaacggggtaaagaaaggtacatgaggagaattatccagcatatttaacgccagtcgctggataccatccgtaaatgctgcaactttatgcacacgctcagtgctggtgaaagtttccagtctggaaacggcatcttcatcggtaatgaagtgcgtcatattggcatattcacccaccatcggcgtaagcggcaattgcagaccgtgaccaaaatccaccaccacgccgccatcgccaatctgcataatcaaggtgccattagccgatgaaatcaatcccagaaacgtgcaggcaaaatcgcgaactgctaattctttggcttccgcctcggcaaaaagtcgctgacgaacggtcagcacaatatccgtggcgaggatatcattaagccccaattccccaccctgcactttttgcgacatataagccatcgcttcattgacggcgagcgtcgcgccttctcctccctgcgaaacgctacctgcgccatcagcaaggaacatcaccagtaatggctgctggtcatttagccaggcaacctgcatctggcaggcatcctggcaaggcaagtccgcgctgatgtgcgatgttccaacagcggatgcataaaccagacgccagctcacactgacgtccagccttttggcgcttccagcacaacttccgttcccggcgtggagcgggaaaccgaacgcagcgaactggataaccagctaaacagttcacggaattgtaatccttgcagaggcaaaggctgacgaacgctgatttgtgccagcgtcttcatatccgccccctgaacagcgatggaaaagaaggcaaacttcttatcttcttccccctgaaacactttgttggcggcagcctgccactcatcggttggagcgccatcggtgatcaggaaaatccacgggcgataatacgaaataccatttgcgcggtactcacgtttcctctcttcaaccatatccagggctttggtaatggcggcccccattggcgtatccccctgggcaaacaggatgggcgggaaaaagttagcggcgctggtaaagggttgttccacatgcaccgggccgaacgtcacaatgccgagttccactctttttaaagccagcggatcggcaagcagttcatcacgaaaggtcaccaatccggcgttaagttcattaataggtctgccgctcatcgagccagaaacatccagcagcaaaatgcaggggcaacgtggttccgggttactggcaaaatcgctggtggcaaacgtaatttgttcgctcataagaaatcctttcttagagaattatcgaggtccggtatcataccgactgcaataatgaaataagagcaaacgaagaaactttcagaattaggcccggcggcgcagaaaattttgctattcgcctcgcaagaacggagagccgtcgattgacactaagggcggagtgacataatttcaggagtgagggttagggagaggtttcccctccccctggtgttcttagtaagcctggaagctaatcactaagagtatcaccagtatgatgacgtgcttcatcataaccctttccttattaaaagccctcttctccgggagaggctttcccgtttcagcgtcccgctgaaatcatcggcttacctcctttcgccctgaatgcagtctatcgctaacgcgtgaataaaatagtttcctctgtgattattgcgtaacgactcgcaaagaatatttgctggcaggatcgcagactacaaagcctgcggattgacaatcttatcgtgaaggcatactttcaggagtgagggtagagcggggtttcccccgccctggtagtcttagtaagcggggaagcttatgactaagagcaccacgatgatgagtagcttcatcatgaccctttccttatttaaggccccttcctcgggaggggctttcccgtttcagcgtcccgctgaaatcgtcggcttacctcctttcgccatgcacttagtctatcgctgacttgcagataaaatagtttccagtgtgattattgtgtaacgtctcgcaaagaatttttgctggcaggatcgcagacggcaaagcctgcggattgacaatcttatcgtgaaggcatactttcaggagtgagggtagagcggggtttcccccgccctggtagtcttagtatgctgggtagctaatcactaagagcaccacgatgatgagtagcttcatcatgaccctttccttatttaaggccccttcctcgggaggggctttcccgtttcagcatccggctgaaatctgcggcttacctcctttcgccctgtatgcagtctatcgctaacgcgtagataaaatagtttcctgtgttattactgtatgcgtgctcgcaaatgtgcccgccattcagacgattcccgatagtgtttcataattcctccatttttctcccttattggctggctacactagtatcattccgcgaaacgtttcaggaagagaaactcttaacgatgaaaggcagttataaatcccgttgggtaatcgtaatcgtggtggttatcgccgccatcgccgcattctggttctggcaaggccgcaatgactcccggagtgcagccccaggggcgacgaaacaagcgcagcaatcgccagcgggtggtcgccgtggtatgcgttccggcccattagccccggttcaggcggcgaccgccgtagaacaggcagttccgcgttacctcaccgggcttggcaccattatcgccgctaatactgttacggtgcgcagccgcgtggacggtcaactgatggcgttacatttccaggaaggccagcaggtcaaagcaggcgatttactggcagaaattgaccccagccagttcaaagttgcattagcacaaacccagggccaactggcaaaagataaagccacgcttgctaacgcccgccgtgatctggcgcgttatcagcaactggcaaaaaccaatctcgtctcccgtcaggagctggatgcccaacaggcgctggtcagtgaaaccgaaggcaccattaaggctgatgaagcaagcgtcgccagcgcgcagttgcaactcgactggagccgcatcaccgcaccagtcgatggtcgcgttggtctcaagcaggttgatgttggtaaccaaatctccagtggtgataccaccggaattgtggtgatcacccagacgcatcctatcgatttagtctttaccctgccggaaagcgatatcgctactgtagtgcaggcgcaaaaagccggaaaaccgctggtggtagaagcctgggatcgcaccaattcgaagaaattaagtgaaggcacgctgttaagcctcgataaccaaatcgatgccacaaccggtacgattaaagtgaaagcacgctttaataatcaggatgatgcgctgtttcccaatcagtttgttaacgcgcgcatgttagtcgacaccgaacaaaacgccgtagtgatcccaacagccgccctgcaaatgggcaatgaaggccattttgtctgggtgctgaatagcgaaaacaaggtcagcaaacatctggtgacgccgggcattcaggacagtcagaaagtggtgatccgtgcaggtatttctgcgggcgatcgcgtggtgacagacggcattgatcgcctgaccgaaggggcgaaagtggaagtggtggaagcccagagcgccaccactccggaagagaaagccaccagccgcgaatacgcgaaaaaaggagcacgctcctgatgcaggtgttacccccgagcagcacaggcggcccgtcgcgcctgtttattatgcgtcctgtcgccaccacgctgctgatggtggcgatcttactcgccgggattatcggttatcgcgccctgcccgtttcggcgctgccggaagtggactatccgaccattcaggtggtcacgctctacccaggtgccagcccggatgtcatgacctctgccgttaccgcgccgctcgaacgccagttcgggcagatgtctggcctgaaacagatgtcgtcgcaaagttccggcggtgcgtcagttatcactttgcagttccagctaacattaccgctcgatgtcgccgagcaggaagtgcaggccgcgattaacgctgcgaccaacttgttgccgagcgatctgcctaacccgccggtttacagcaaagtgaacccggcagatccgccgatcatgacgctcgccgtcacctcaaccgccatgccgatgacgcaagtggaagatatggtggaaacccgcgtcgcgcagaaaatctcgcagatttccggcgtcggcctggtgacgctttccggcggtcagcgtccggctgttcgcgtcaaacttaacgctcaggcgattgccgccctcggcctgaccagcgaaaccgtgcgcaccgccattaccggcgctaacgttaactcggcaaaaggtagcctcgacggcccttcccgtgcggtcacgctttccgcgaacgaccagatgcaatccgccgaagagtatcgccagctaatcatcgcctaccagaacggcgcgccaattcgtctgggcgatgtcgcaactgtagagcaaggtgcagaaaacagctggctcggcgcgtgggcgaacaaagaacaggccattgtgatgaatgttcagcgccagcccggtgctaacattatctccaccgccgacagcattcggcagatgctgccacagctcactgagagtctgccgaaatcggtgaaggtgacagtgctttccgatcgcaccaccaatatccgcgcatccgtcgatgatactcagtttgaattgatgatggctatcgcgctggtagtcatgattatctacctgtttttgcgcaatattccggcgaccatcattcccggtgttgctgtaccgctgtcgttaatcggcactttcgcggttatggtgtttctcgatttttcaatcaataacctgacactgatggcgttaactatcgccaccggattcgtggtcgatgacgccatcgtggtgatcgaaaacatttcccgctatatcgaaaaaggcgaaaaaccgttggcggcggcgctcaagggcgcaggtgaaatcggctttaccattatctcgctgaccttctcactgattgcggtgttgatcccactgctgtttatgggcgatatcgtcgggcgactgttccgcgaatttgctattacgctggcggtagcgattttgatctcagcggtggtgtcgctgaccctgacaccgatgatgtgcgcgcggatgctcagccaggagtcgttgcgtaaacagaaccgcttctcccgtgcctcggaaaaaatgttcgacaggataatcgccgcctatggtcagggacttgcgaaagtgctgaatcatccgtggctgaccttaagcgtggcactcagcacgctgctgcttagcgtgctgctgtgggtgttcattccgaaaggtttcttcccggtacaggacaacggcattattcagggcactttgcaggcaccgcaatccagctcctttgccaatatggcccagcggcaacgccaggtcgcggacgtgattttgcaggatccagcggtgcaaagtttgacctcatttgttggcgttgatggcactaacccgtcgctgaatagtgcgcgtttgcagatcaacctcaaaccgttggaggaacgtgatgatcgggtgcaaaaagtcatcgcccgtctgcaaacggcggtggataaagtgccgggcgtcgatctcttcctgcaaccaacgcaggacctgaccatcgatactcaggtcagccgcacccagtaccagtttaccttgcaggccacctcactggatgcgctcagtacctgggtgccacagttgatggaaaaactccagcaactgccacagctttctgatgtctccagcgactggcaggacaaagggctggttgcgtatgtcaatgttgatcgcgacagcgccagccgtctggggatcagcatggcggatgtcgataacgccctgtacaacgcgtttggtcagcggctgatttccactatttatactcaggctaaccagtatcgcgtggtgctggagcacaacaccgaaaatactcctggcctcgcggcgctggataccattcgcctgaccagcagcgacggcggcgtggtgccgctaagctcaattgccaaaattgagcagcgttttgcgccgctttccatcaaccatctggatcagttcccggtaacgaccatctcctttaacgtgccggataactattcgctgggcgatgcggtgcaggcgattatggacaccgaaaagacgctgaatctgccggtggatatcaccacgcaatttcagggcagcaccctcgccttccagtcggcgctgggcagcactgtctggctgattgtcgcggcggtggtggcgatgtatatcgtgctcggcattctgtacgagagctttattcacccgatcaccattctctcgacgctacccaccgcaggggtcggcgcgctgctggcattaatgattgccggtagcgaactggatgtgattgcgattatcggcattattttgctgatcggtattgtgaagaagaacgccatcatgatgatcgacttcgcgctggctgctgagcgcgagcaaggcatgtcgccgcgcgatgcaatctaccaggcttgtctgttgcgttttcgtccgatcctgatgaccaccctggcggctctgcttggcgcgctgccgctgatgttgagtaccggggtcggcgcggaactgcgtcgtccgttaggtatcggcatggtcggcggtctgattgtcagccaggtgctgacgctgttcaccacgccggtgatttatctgctgttcgaccgcctggcattgtggaccaaaagtcgctttgctcgccatgaagaggaggcgtaagtgaagttttttgccctcttcatttaccgcccggtggcgacgattttactgtcggtcgccattaccctctgcggcatactgggcttccgtatgctgccggtcgccccgctgccgcaggtcgattttccggtgattatggtcagcgcctcgctgcccggtgcgtcgccggagacaatggcgtcttccgttgccacgccgctggagcgctcacttgggcgcattgccggggttagtgaaatgacctccagtagttcgctcggcagcacgcggattattttgcagtttgattttgaccgggatatcaacggcgcagcgcgtgatgtgcaggcggcgatcaacgctgcacaaagtttgctgcccagtgggatgcccagccgtccgacctatcgcaaagcgaacccgtcggatgcgccaattatgatcctcacgctgacatccgatacttattctcagggtgaactgtacgatttcgcctcgacgcagctggctccgacgatttcgcaaatcgacggtgttggtgatgtcgatgtcggcggcagctcactgcccgccgtacgcgtcgggctgaatccgcaggcgctgtttaatcagggcgtctcgctggacgacgtacgcaccgccatcagcaatgccaacgtgcgtaaaccacagggggcactggaagatggcactcaccgctggcagatccagaccaatgatgagctaaaaaccgccgctgaatatcagccgttgattattcattacaacaacggcggcgcggttcgtctgggtgatgtggcgacggtgactgactcggtgcaggatgtgcgcaacgccgggatgaccaacgccaaaccagctattttgctgatgatccgcaagctgccggaagccaatattatccagacggttgacagcatccgggcaaaattaccggagttgcaggagaccattccggcggcgattgatctgcaaattgcccaggatcgctcccccaccattcgcgcctcgctggaagaagtcgagcaaacgctgattatctcggtggcgctggtgattctggtggtgtttttattcctgcgctcgggtcgcgccactattattcccgccgttgcggtgccggtttcgctgattggtacgtttgcggcgatgtacctgtgcggattcagtctcaataacctttcgttaatggcgctcaccatcgctactggtttcgtggtggatgacgccatcgtggtgctggaaaacattgcccgtcacctggaagcggggatgaaaccactacaggccgcgctgcaaggtactcgcgaagtcggctttacggtgctgtcgatgagtctgtcactggtggcggtgttcctgccgctgctgttgatgggcggattgccgggccgactgttacgcgagtttgccgtgacgctttctgtcgccattggtatttcgttgctggtttccctgacgctaacgccgatgatgtgtggctggatgctgaaagccagcaagccgcgcgagcaaaagcgactacgtggttttggtcgcatgttggtagccctgcaacaaggctacggcaagtcactgaaatgggtgctcaatcatacccgtctggtgggcgtggtgctgcttggcaccattgcgctgaatatctggctatatatctcgatcccgaaaaccttcttcccggaacaagacaccggcgtgctgatgggcgggatacaggcggatcagagcatttcgtttcaggcgatgcgcggcaaattgcaggatttcatgaaaattatccgtgacgatccggcagtggataatgtcaccggctttaccggcggttcgcgggtgaatagcgggatgatgtttatcaccctcaagccacgcggcgaacgcagcgaaacagcgcagcaaattatcgaccgtctgcgcgtgaagctggcgaaagaaccgggggcgaatctgttcctgatggcggtacaggatattcgcgttggtgggcgtcagtcgaacgccagctaccagtacacgttgttatccgacgacctggcggcactgcgcgaatgggagccgaaaatccgcaaaaaactggcgacgttgccggaactggcggacgtgaactccgatcagcaggataacggcgcggagatgaatctggtttacgaccgcgacaccatggcacggctgggaatcgacgtacaagccgccaacagcctgttaaataacgccttcggtcagcggcaaatctcgaccatttaccagccgatgaaccagtacaaagtggtgatggaagtggatccgcgctatacccaggacatcagcgcgctggaaaaaatgttcgttatcaataacgaaggcaaagcgatcccgctgtcgtatttcgctaaatggcaaccggcgaatgccccactatcggtgaatcatcagggattatcggcggcctcgaccatctcgttcaacctgccgaccgggaaatcgctctcggacgccagtgcggcgatcgatcgcgcaatgacccagcttggcgtgccttcgacagtgcgcggcagttttgccggcacggcgcaggtgttccaggagacgatgaactcgcaggtgatcctgattatcgccgccatcgccacggtgtatatcgtgctgggtatcctttacgagagttacgtacatccgctgacgattctctccaccctgccctcggcgggcgttggtgctctgctggcgctggagctgttcaatgccccgttcagcctaatcgccctgatagggatcatgctattaatcggcatcgtgaagaaaaacgctattatgatggtcgattttgcgcttgaagcccaacggcacggtaacctgacgccgcaggaagctattttccaggcctgtctgctgcgttttcgcccgattatgatgactaccctggcggcgctgtttggtgcgctgccgctggtattgtcgggcggcgacggatcggagttgcgccaacccctggggatcaccattgtcggcggtctggtaatgagccagctcctgacgctgtataccacgccggtggtgtatctctttttcgaccgtctgcggctgcgtttttcgcgtaaacctaaacaaacggtaaccgagtaaatgacagatcttcccgacagcacccgctggcaattgtggattgtggctttcggcttctttatgcagtcgctggacactaccatcgttaacaccgcgcttccctccatggcgcaaagcctcggggaaagcccgctgcatatgcacatggtcattgtctcttatgtgctgaccgtggcggtgatgctgcccgccagcggctggctggcggacaaagtcggcgtgcgcaatattttctttaccgccatcgtgctgtttactctcggttcattgttttgcgcgctttccggcacgctgaacgaactgttgctggcgcgcgcgttacagggcgtgggcggcgcgatgatggtgccagtcggaaggcttacggtgatgaaaattgttccgcgcgaacagtatatggcggcgatgacctttgtcacattgcccggtcaggtcggcccgctattgggtccggcgctcggcggcctgctggtggagtacgcgtcgtggcactggatctttttgatcaacattccggtggggattatcggcgcgatcgccacgctgatgttgatgccgaactataccatgcagacgcggcgtttcgatctctccggctttctgttgctggcggttggcatggcggtattaaccctggcgctggacggcagtaaaggtacaggtttatcgccgctggcgattgctggcctggtcgcagttggcgtggtggcactggtgctttatctgctgcacgccagaaataacaaccgcgccctgttcagtctgaaactgttccgcactcgtaccttttcgctgggcctggcggggagctttgccggacgtattggcagtggcatgttgccctttatgacaccggttttcctgcaaattggcctcggtttctcgccgtttcatgccggactgatgatgatcccgatggtgcttggcagcatggggatgaagcgaattgtggtacaggtggtgaatcgctttggttatcgtcgggtactggtagcgaccacgctgggtctgtcgctggtcaccctgttgtttatgactaccgctctgttgggctggtactacgttttgccgttcgtcctgtttttacaagggatggtcaactcgacccgtttctcctccatgaacaccctgacgctgaaagatctcccggacaatctggcgagcagcggcaacagtctgctgtcaatgattatgcaattgtcgatgagtatcggcgtcaccatcgccgggctgttgctgggactttttggttcgcagcatgtcagcatcgacagcggcaccacacaaaccgtctttatgtacacttggcttagcatggcgttgatcatcgcccttccggcgttcatctttgccagagtgccgaacgatacgcatcaaaatgtagctatttcgcggcgaaaaaggagcgcgcaatgaagttctggcgacccggtattaccggcaaactgtttctggcgattttcgccacctgcattgtcttgctgatcagtatgcactgggcggtgcgtatcagttttgagcgtggctttattgattacatcaagcatggtaatgaacagcgattacaactgttaagtgatgcgcttggcgagcagtatgcgcagcatggcaactggcgcttcctgcgcaacaatgatcgctttgtctttcagatcctgcgttcatttgaacacgataattcggaagataaacccggcccgggtatgccaccgcacggctggcgtacccagttctgggtggttgatcaaaacaacaaagtgctggttggtccgcgagcgccgattccacctgacggtacacggcgacccattctggtcaacggtgcggaagttggcgcggtgatcgcctcccccgttgagcggttaacgcgcaatactgatatcaatttcgataaacaacagcggcaaaccagctggttgattgtcgctctggcaacgttactcgcggcgctcgccacctttctgctggcgcgtggtctgttggccccggtcaaacggctggtggacggcacgcacaaactggcggcgggcgatttcactacccgcgtaacgcccaccagtgaagatgaactgggcaaactggcgcaagacttcaaccagctcgccagcacgctggagaaaaaccagcaaatgcggcgcgattttatggctgatatttctcacgaactgcgtacgccattagcggtgctgcgcggtgaactggaagccattcaggatggcgtgcgtaaattcacgccggagacggtggcgtctttacaggcggaggtcggtacactgaccaaactggttgacgatcttcatcagttgtcgatgtctgatgaaggcgctctcgcctatcaaaaagcaccggtagatttgatcccactgctggaagtggcgggcggcgcatttcgcgaacgatttgccagccgtggcctgaaactgcaattttccctgccagacagtattaccgtatttggcgatcgcgaccgtttaatgcagttattcaataacttacttgaaaacagcctgcgctacactgacagcggcggcagcctgaaaatctctgccgagcagcacgacaaaacggtgcgcctgacctttgccgacagtgcgccaggtgtcagtgacgatcagctacaaaaattgtttgaacgtttttatcgcaccgaaggttcccgcaaccgcgccagcggcggttccgggctggggctggcgatttgcctgaacattgttgaagcacataatggccgcattattgctgcccattcgccttttggcggggtaagcattacagtagagttaccgctggaacgggatttacagagagaagtatgaccgagttaccaatcgacgaaaacacaccgcgtattttgatcgtggaagatgaaccgaagctgggacagttgctcattgattatctgcgtgctgcgagctatgcgccgacgcttatcagccacggcgatcaggtactgccgtatgtgcgccagacaccaccggatctgatcctgttagatctgatgctccctggcaccgatggcctgacgctgtgccgggaaattcgtcgtttttctgacattccgatcgtgatggtgacggcaaaaatcgaagagatcgatcgcctgctggggctggagattggcgcagatgattatatctgtaagccgtacagcccacgggaagtggtagcgcgcgtcaaaaccattttgcgccgttgcaaaccgcagcgcgagttgcagcaacaggatgctgaaagcccgttgattatcgacgaaggtcgttttcaggcttcatggcgcggtaaaatgcttgacctgacgcctgcggaatttcgtctgctgaaaacgctctctcatgaaccaggaaaagtgttctcccgcgagcatttgctcaatcatctttatgacgactaccgcgtagtaaccgaccgcaccatcgacagccacattaaaaacctgcgccgcaagctggaatctctcgacgccgaacagtcatttatccgcgccgtttacggcgttggttaccgctgggaagccgacgcctgccgcatcgtttagttttagcgacatgactttgttagccggagatggcgttcagaccagatccggcaacattatcccacgcatggtcagcaaactgacattatctctccgccctggcaggcatcagaaaatcgctcatactttaatcggtaaacagcacctttagatgctgttttcgatacgcaatttcaatcaaggagtcattatggctggttggtttgaactcagtaagagcagtgataatcagttccggtttgtgctaaaagcgggcaatggtgagactatcctcaccagcgagctgtatacctcaaaagcctctgcggaaaagggcatcgcgtcggtgcgtagcaacagcccgcaagaagaacgctatgagaaaaaaacggcaagtaacggcaaattctatttcaatctgaaagccgctaatcatcaaattatcggctccagccagatgtacgccaccgcgcaatctcgtgaaaccggaattgcctccgttaaagccaatggcacaagccagacggtgaaagacaatacgtaattacgatgccgggcgtgggttgttggcgtccggctttatatccaaataacgcttagttattaataattaagagtaaccgccgccattaaaatagtgggcactgacgagcactcgttgtgctttctttgtttaccatcccatacttatcctcctgaacatgttcatgtgccaaaatatcttctaatactttcgtgacgctatccggtttatgacatacactgatgtaagatttttacttacaggcgggcgtaaaatggccagaacgatgacggttgatctcggcgatgagttgcgtgaatttatcgagtccttaattgaatccggcgactatcgcacccaaagcgaagtgatccgtgagtcactgcgattacttcgagaaaagcaagcagagtctcgcctgcaagcgttacgtgacatgctcgcagaagggttgagtagtggtgaagctcagccgtgggaaaaggacgcgttcttacggaaggtgaaagcagggataaggaaataatgtgcgtattattaaactcatgccaaaagccaatgaggatttagaaggcatctggtattacagctatcaccatttcggcgaaccacaagccgacagatatgtggaacatctttcagacgttctccagattctgagtaacaataatataggtacgcccagacctgaattaggcgaaggtatttttgttcttccttttgaacgccacgtcatttatttcctgcaatcaccaggggaaattatcgtcattcgtatccttaaccaaaaccaggacgccaccagacatttacactggagctaaacccgccgattgcgctacaatgcccgcccttaaagtgggggcactcccctaaccgcttcatcaggtgaagcggatctgacctgtcatcagaacgagagaattatgtttaaaccggaactcctttccccggcgggaacgctgaaaaatatgcgttacgctttcgcttatggcgcagatgctgtttatgcgggccagccgcgttattccctgcgtgtgcgcaacaacgaattcaaccacgaaaatcttcagctcggcatcaatgaagcccacgcgctggggaaaaagttttatgtcgtggtcaacattgcaccgcacaacgccaagctgaaaacctttatccgtgacctgaaaccggtggtggaaatggggccggatgcgctgattatgtccgatccagggctgattatgctggtgcgtgagcacttccctgaaatgccgatccacctttcggtgcaggctaacgccgtgaactgggcgacggtgaaattctggcagcaaatgggcctgacccgcgtgatcctctctcgcgagctgtcgctggaagagattgaagagatccgcaatcaggtgccggatatggagatcgagatcttcgttcacggcgcgctgtgcatggcctactccggtcgctgcctgctctctggctatatcaacaagcgcgacccgaaccagggcacctgcaccaacgcctgccgctgggagtacaacgtccaggaagggaaagaagatgatgttggcaacatcgtacacaagtacgagccgattccggtgcaaaatgttgagccgacgctgggtatcggcgcaccaaccgacaaagtgtttatgatcgaagaggcccagcgtccgggcgagtatatgaccgcgtttgaagatgagcacggcacttacatcatgaactcgaaagatctgcgcgccatcgcccatgtagaacgcctgaccaaaatgggcgtgcattcgctgaaaatcgaaggtcgtaccaaatctttctactattgtgcacgcaccgcacaggtttaccgcaaagctatcgatgacgccgctgcgggaaaaccgttcgataccagcctgctggaaactctggaaggtctggcgcatcgtggctataccgaaggtttcctgcgtcgtcatactcacgacgattatcagaactacgaatacggttattcagtttctgaccgccagcagtttgttggtgagtttaccggtgagcgcaagggggacctcgcggcggtagcggtgaaaaataaattctccgttggcgacagccttgagctgatgacgccgcaaggcaacattaattttacccttgagcacatggaaaacgccaaaggcgaagctatgccgatagcaccaggcgatggttatactgtgtggctcccggtcccgcaggatcttgagctcaattacgcgctgctgatgcgtaatttctccggggaaaccacgcgtaatccccacggtaagtgattaatttcgattatttttcccggatggaaaattcttagaaaccgatcacatacagctgtatttattaaggttatcatccgtttcgctgaaaaacataacccataaaatgctagctgtaccaggaaccacctccttagcctgtgtaatctcccttacacgggcttattttttatgcataagccctatccctggtcaccgtcttccattgaccacatcgatagaatctcccttcatagcacgatgcctttcacgtaacggcatcgtgctcgcacaggttccggctaagcacaaccagaacgcgcatgtttgacgcttaccaaaaaatattctcactctccacatttgaatgtcagacgagcgacgccatgtaatcctgcaccttctgtcttcaggtcaactatctgcattttttgccctgagtaacacagaaatgggctgcatcattttttactatattttctgcaccagatattctgcccctggctaaagaagcttcggcttcggtgtagtattggttatcgagtttacgctgaatattacttttatatgcaagaccaaatttaccgatacttgtctcatcattatgcacagcacaaccagacataataaaaatactaattaatgatatagcagctatctttttcatctcaccttcccccattaaataccaacgacactctctagtgtttaaatataataatggcatgattattataattgaataggattataataaatgttctgtacaacatttcctacataagtaggaattacggacattgaggcccttcagggtaactccatgggggctttaatatatttggaatagtatatttaagatgccactgtttggttgaatattaggcatatgctcttttttgaaatttatcggtggcagccgttagtattcgctgtccccattgcaagctcctggtggtaaccactgaatcctccatacttgaactgactttttatcctccgactttcatcctgttctgactccaccttttgttttctgctctacactatctacagaccaatcataaaggcacatacgatcatggcagaatttcccgccagcttactgattcttaatggcaaaagtactgacaatctacccttgcgcgaagcaattatgctgttgcgtgaggaaggaatgacgatccatgtgcgggtcacctgggagaaaggcgatgccgcacgatatgtagaggaggcccggaagttgggcgtcgcaacggtgattgccggtggtggcgatggcaccattaatgaagtttctacggcgttgattcagtgtgagggggatgacatacccgcgctgggaattttgccattaggaaccgccaatgattttgccaccagtgtagggattcctgaggcactggataaggcgctgaaactggcaattgccggtaacgccattgcgatagatatggcgcaggtcaacaaacaaacctgttttattaatatggcgacaggcggatttgggacgcgtattaccacagaaacgccggaaaaattaaaagccgcgctgggtggcgtctcttacatcattcatggcttaatgcgcatggatactctgcaaccggaccgttgtgaaatccgcggtgaaaactttcactggcaaggtgacgccctggtcattggtattggtaacgggcgtcaggccggtggcggtcagcaattgtgtccgaacgcgttaattaacgatggcttgctgcaactgcgcatttttaccggcgatgaaattcttccggctctcgtatcaaccttaaaatctgacgaagataacccgaatattatcgaaggcgcttcgtcgtggtttgatatacaagccccacacgaaatcacttttaatcttgatggcgaaccgttgagcggacaaaactttcatattgaaatacttccggcggcgttgcgttgtcgattaccaccagattgtccattattgcgttaatcaaactattctctcttgaaccagggagaatccgaaatgccggatgcagtgtaaataccttatccggcatacagaacaatactacaccgtaattaattttacccgtgtcttctgcaatgccagtttatccacctcagacacagcatcatcggtaataataatgtcaattttttcgattggcagtacctgattaaaaccgcgacggttaaatttcgatgaatcgagaacggcaatcactttattagcggcggtgaccatcgccccgctaatcgaataaccttcattaaaggtcgtaataccattaaccgcatcaataccatcagcaccgacaaacattaaatcggcattaatatcctgcaatgaacgctcggcaatggaaccatgcatcgagcgcgttttatggcggaccgtgccaccgcagacgaccagagtaatgtctttattttcggaaagggcaaacgctgccgggagactgttggtaatcaccgtgatatttttggcggtcattaatccttcggcgataagcatcgtcgtacttccgctgtcgagaataacggtcatcccttcgtggatcattttgactgccgcctgcgctattctgttttttggcgcgctggcgagctgaaatcgctctttaaacccgacttcctgggtctcggtttcactattaccggacattattttcgccgcaccgccatgaaagcgcgtaaccacgcctttttgttcgagaaagcgcaaatcggcacggattgtcgcttccgaggcagcaaatactcccgccagatcctgaacaagcacggttccctgttcattcactaattggatgatcttattccttcgctcgaatgaattcatcgtcatttacccatattcaattgtggctagtgtaaacgaagggggaccattggtgaatgatctgttttgcacaataccgggccagcatcacgctggcccgcggtttcatggaatgagcaacactttgcccggcatggcattacgagcgatgtcacgcaccgcctgggtgaagctttcaaagcttccacggtgagcgattaatggctccaggcttaacttacgttctgtcagcaaccggctcgccgtttcccactcctgccccggccaagggctggaatagttcatccaactgccgataaccgtcagctctttacgcaatattttgccaaacgttgccgatgttaaatgcagatcctgatgcaacgtgcccaccagcgccagttgggcatgaggaccggcaatctctaccgccagttcgacagtttgcggtacgccagccgtctcgaggataagctgattaaaacgcagttcgcgtaaaacgctctgcatttgcggcgcgcccatttcgctactgttaaatgtttgcatcgcaccgaaagattttgccagtgccagtttttctgagctaatgtcgatagccgtcacactctttgctcccagcgcgacagcgcactgaatagccagcaggccaatggttccggcaccaataataataacgtttttattctcacaaccttgcgctaaatgaaaagcatgcagaccaacggtaatcggctcaataaaagccccatcctcaataggcatatccgtgggtagagcaaagacattttttcgcttaacgacaatatattcagcaaatccaccatcacgccgcgagccaataaaatcatattttgcgcactgggaataaaaccctttcagacactctggacaagtaaaacagggtaataacggcacacaggcaaccgcatcgtcagggtgtaaatcatcaacaccggatcccaccgcatcaatatagccgctaaattcatggcctaacgttattggataataatgtgcaccatttttaaatatcctggataaatcggaaccacataagcccgagctggcaatttttacccgcacctcatcctgatgtttaatttcaggaatgacgctttctgcaacgcgcacgataccatcagtatcattcaccactgatttcataaaaactcctgattgttaagggggataacctccccctcaggtaaaaattattctgcgagaacgactttctcttgtttaataaagccacgcgctctacgccaggtcatgaaaataccggtcagataaattgcaccgataataatgaaaccgggaatattttgcggggagaaaacctgaatcagtaaccaggtaatgggagaaccgccctgatccattgaagccaccatacccccggcttttaacgccccagcattagccgccagttgggtgtgcaaaccaatagtttgcgtcgcgatccacagggtgatgctcataatgatgacacccgagattaaggtgcggaacagatttccacgatgcacggcgaccgccatcgccacgaagaagccgatggtggcaagatcgccaaacggcagcacctgattacccggcacacaaacagcaattaaaatggtgagtgggataaaaatcaggcttgccgataccaccgccgtatgtcccagcagcaacgccggatcaaggccaatcaggaactcctgaccgccgaacttcgcctgtaaacgactacgagcctgcttagcgatgggcgttaaaccatccatgatgggtttaatcacccgtggcattagcagcatcactgccgccgtttttaccgccagctgcaatacacctttgacatcgtaacccgcgaggatgccgataatcagccccatcacaaaacccacggtgacaggctcgccaaatggaccaaatttgcgctgaatatcgtcggcgctaaatttaattcggttaacgtctgggattttctcgatgatagcatcgaccagcaccgcaatcggccccatatacgccgacgtaccgtgcggaatagcaataccttccagctcaaagaaatttcgggtatcgcgggcaaaccagtcgccgagcttataaacaaacgccgcgtgaattacgacacctgccatccctatcatccatgaaccggttgccagatgcagcaacgcgccggtgaaggtcatatgccagatattccagatatcaacatttaccacccgcgtcatacgggtcagtaacatcgccacgttaaccagaatcgcaatcggaatcgccaccagcgcaatttgcgaagcccaggtcattggtgaagagcccggccagccgacatcgaccacatgcagattcaggtcgaaattttccgccatcgctttcgccgccggaccaatggaatccagcattaagccaatcacaaggccaatgccaacaaagccaatcccgatatgcagacccgctttaaagcaatcgcctgccttcatgcctaatattttagaaaaaataatgatgacaatcggaagcatcaccgtagggccgaggtcgagaatataacgcatgacttctgaaaacataggtcacccctgtaagatagtcagaattttattttgtaatgcttcgataccgacaccagaaataaaaggcatgccgtgaactaacggaatatcgccaaaactacgatccactttggcagtggtgcatatcaaatgcacaccatccatataggtttctatttcattaacccgacactggattaattcaacaggaatattatgattctgacacaactctttaatttcttccgccgccatcgtagaggtcgcaaccgcgcctccgcaagcgacaataatcttgcgtttcataaatagtcctttttattgttacagagagatttattcgtctgaatctaaaacatactttgtgaagtattcctttaactgggtttcaggaagagtgattagtgtctcgacgatatcgggctgttgtaacttgccaaataaacagcgtaaaagtttcaattgctgctgcggattttccacaatcaacgcaataaccaacgatacctccacgtcgttatcatcatccgcttgctgaaaatgaactttatttgttggccttaacagataaatggctgacgacttagcatgaatcgcctcacaatgcggtattgcaatggcgtgctgctcaagcattatcccggtagggaattctgcttctctggcaattaatgcctgtggccaggtatcatgaaccacacctttggcgagcatctcattaccgatatgggttaaaacttcgctacgatcgacaaaagaaattccgctacgaacaaacaggttagtcatataccgtccttattccgcacagccgtagcgataggcgcgcaaaacatcataaattttatccataatcagctgatgcggtattgctgataattccccggactgaatgcgttcaaattgtttgggaagatactgactaatcatgcccagtgggatgtccacgccttgcagattcaccatcatcgtttcgacgctatttttaatccgactatgcggccagtaataacgaatacgatccgacaggctgtaacgaatatccagtaatgaatcgttaaaacccgtacgataatattttttccagtattgcggttcgtcgagcatcacttcttcaattaccgccaggcaaccgctgcgattttcgggggcgataagttcctgctcaatttgtgccagtgcaaatatcgcctcgcgtaaagcaaaggttaatgcgggaccgactttcaatattgcaaagtgatcgcggactaattcccaataagccgtccgggtctggtaatcggtagaatgtgcttcataaaccattcgggtattttctatccattgcgccagcgcctgcgcttcctgcggctgataatggataatattgctgtgatcaaattccacacccggctgcaccacgatggcaatcacgcgtgttaacgcctctgtcagcccacgggcaataaaggccttttgatgcgtacgtaaagtattggcggcatcttcaacatgggtgatgtgtactgactgaatggcgctggcctcaccgcccggaaccggaacttcggtgccaatgacatagctcagttgctcacgctggcaatctgtcgccacactttccgcagcaaagcacagcagctcgttccgcaaccgtttctggtgctaacggtatgggatcccccgcgcaggacattgacgcatcaagatgaattttactgaagccagcacgaacatatgcctttaccagctcgacggatttttccatcgccgcatccacattttcttgctgccagcagtttggccccagatggtcaccgccgagaataatgcgctcgcgcgcaaatccgactctatcggcaatcgtaaaaacaaattcgcgaaagtctgccggtgtcattccggtataaccgccaaattgattgacctggtttgacgttgcttcaatcagcactttgcgcgtgctgttgcgatcaaatgccagcgccgcttcgataaccaacggatgggcagaacagactgaacatatgccgatatgttcaccagctttatgccgggcaattaacgttttcatattttttccttgttaaatggcaggtgcgttatgccctgccctcgcagccacaatcggcaatcactttgctcaccacatcgcgcattgcggatttagccgactgcaaataatcccggggatcggtcgcttcggggtgctcggtcaggtaattttttaacgcctgcgagaaggcatttttcagctccgttgcaacgttgattttgcatatccccagtttgatggtttgctgaatatccttagtcgataaccctgacgcgccatgcagcaccagcggtaagttcacccactggcgaatgttctccagtcgagaaaaatcaagcgccggtgcgctggcatacataccatgagccgtgccgatggctaccgccagggaatcaattccggttgcctcggcaaattcacgcgcctgagcggggttggtataaaaagcatcggcttcattgacttgcacatcatcttcctggccgccaagttgccccagctccgcttcgacgctgacatcaaagcgatggcaaaaatccaccacctctttgacccgtgaaatattttgcgcaaaaggcaaatgcgaggcgtcaatcatgactgagcgcacgccagaacgaaccttctgagcgatatcgtcaaatttcgtgtgatggtctagatgaattgccagtggatggtgatattgcttcgccatcgcgctgaccagcgccaacagattttctgtaccagcatgagtaaatgtgccaggcgttccggcgatgatgaccggcgcatgcaggttggcagcggtttctaccaccacttgcatcgtttcgagattgtgaatattgaatgccggaaccgcataaccgccgcgctgtgcgttgttcagcatctgctttgtcgataccacgcacattttcatatcctgtcgtttgttttcgatttcaaaatataatgaaatgatttgtttttaaatgtcgagataacgatcacaaaaacgacaatgtgaaaattgttcgaggagtaaaaggcaaaaaaaacggcctcccgatagggaagccgtagcaaagtgcgcgtgtttttatgccggatgcggtgtaaacatacgtggcagtgctatgtaggcatgataagacgcttccgcgtcgcatcaggcataggttgccggatgcagtgtaaacgccttatccgtcctacggggtggtgctgttcgtatgaggcgtatcaggcaatagtaattttgctatcgagataaacgtcctgcacggcattaatcagtttcacgccgtcagccatcgatttcttgaacgccttacgtccaagaatcagccccattccgccagcgcgtttgttgataaccgcagtacgcactgcatcgctgaggtcagtttcaccgcccgcagcaccgccggagtttatcaacccagcccgacccatatagcagttagctaactgataacgcaccagatcaatcgggttttcgctggtcaatttgctgtaaacacgatcgtcggtgtaaccgtaattaattgctttatagccgccgttattttccgccattttttgtttgacgatatctgcaccgatggttgccgccagatggtttgcctgaccggtcaggtcggcggaaacatggtaatcaacgccatctttcttaaaggcggagttacgcaaataggcccacagcactgtcaccatacccagctcgtgcgcacgttcaaaagccgcagaaatttcttcaatctggcgacgtgactcttccgagccaaaatagatagtcgcaccaaccgcaaccgcgcccatgttgaacgcctgctccacgctggcatacagcgtttgatcgtaggtattcgggtaacttagcgtctcgttgtgattaagtttgacgaggaatggaatgcgatgcgcataacgccgcgataccgacgccagcacgccgtaagttgacgccacacagttacagcccgcttcgatcgccagttcaacaatgtttttcgggtcaaagtagagcgggctagcagcaaatgaagctccggcagagtgctcaacgccctggtcaaccggcagaatagaaagatatcctgtgccagccagacgcccggtgttgtacaacgtctgcatattacgtaacaccgctggcgggcgattattgtcaatcattacgcggtctacgtagtcatgtccggggagataaagctggtcagaaggaattgtcatacaacggtgctgtaaaaggttgtcggcgtctttgccaagcaactgcgcaatatctgtcattactatgctcccgtaaattccgattggatatcggctatggattgtcctggtccgccttttgcgggcaatcataatcctggtcgttacgggcgagtttttccatcttttggatgttttttcagcgttttctgttggctcgattcatcagaaaaaatgttagcgcggtcaagttttcaccgtaaaggtatttaaaaggtattattaagtggtattgtcatcgcgtaccttacattacctgtcatgaaggaattaaaagatgaaaacaacagcaaagctgtcgttcatgatgtttgttgaatggtttatctggggcgcgtggtttgtgccattgtggttgtggttaagtaaaagcggttttagtgccggagaaattggctggtcgtatgcctgtaccgccattgcggcgatcctgtcgccaattctggttggctccatcactgaccgctttttctcggcgcaaaaagtgctggcggtattgatgttcgcaggcgcgctgctgatgtatttcgctgcgcaacagaccacttttgccgggttctttccgttactgctggcttactctctaacctatatgccgaccattgcgctgactaacagcatcgcttttgccaacgtgccggatgtggagcgtgatttcccgcgcattcgtgtgatgggcactatcggctggattgcctccggtctggcatgtggtttcttgccgcaaatactggggtatgccgatatctcaccgactaacatcccgctgctgattaccgccggaagttctgctctgctcggtgtgtttgcgtttttcctgcccgacacgccaccaaaaagcaccggcaaaatggatattaaagtcatgctcggcctggatgcgctgatcctgctgcgcgataaaaacttcctcgtctttttcttctgttcattcctgtttgcgatgccactggcgttctattacatctttgccaacggttatctgaccgaagtcggcatgaaaaatgccaccggctggatgacgctcggccagttctctgaaatattctttatgctggcattaccgtttttcactaaacgctttggtatcaaaaaggtattattgcttggtctggtcaccgctgcgatccgctatggcttctttatttacggtagtgcggatgaatatttcacctacgcgttactgttcctcggtattttgcttcacggcgtaagttacgatttttactacgttaccgcttacatctatgtcgataaaaaagcccccgtgcatatgcgtaccgccgcgcaggggctgatcacgctctgctgccagggcttcggcagtttgctcggctatcgtcttggcggtgtgatgatggaaaagatgttcgcttatcaggaaccggtaaacggactgactttcaactggtccgggatgtggacttttggcgcggtgatgattgccattatcgccgtgctgttcatgatttttttccgcgaatccgacaacgaaattacggctatcaaggtcgatgatcgcgatattgcgttgacacaaggggaagttaaatgaaaaaagaacgtattctcggtgctctttatgggcaggcgttaggggatgcgatggggatgccctccgagctttggccacgcagccgcgttaaagcacactttggctggattgaccgttttcttcctggaccaaaggagaataacgcggcctgttattttaaccgcgccgaattcaccgacgatacctcgatggcgctgtgtctggcggatgcgttactggaacgtgaaggcaagatcgatccgaatctgattgggcgtaatattctcgactgggcgctgcgtttcgacgcctttaacaaaaacgtacttggtccgacctcgaagattgcgcttaacgccattcgcgacggtaaacccattgctgaactggaaaacaacggcgtgaccaacggcgcagcgatgcgcgtctcgccattaggttgtttgcttccggcgcacgatgttgattcctttattgatgatgtggcgctggcgtccagcccgacccataaatccgatctggcggttgcaggcgcggtagtcatcgcatgggcgatttctcgtgccattgacggagaaagctggtcagcgattgtagattcactgccttcaattgcgcgacatgcccagcaaaaacgcatcactaccttcagcgcctcactggcggcgcggctggagattgcgctgaaaattgtgcgcaatgccgacggcaccgaatccgccagcgaacagctttaccaggtcgttggcgcaggtaccagcactattgagtccgttccgtgcgccattgcgctggttgaactggcacaaaccgacccgaatcgctgcgccgtcctgtgcgctaaccttggcggcgacacagacaccatcggtgctatggcgacggcaatttgcggcgcgttgcatagcgttaacgctatcgatcctgcgttaaaggcggaactggatgcggtaaatcagcttgatttcaaccgctatgccacagcgctggcgaaatatcgtcaacaacgggaggcggtatgagcggcgctcgattacacacgctgatgcctgaattaaccacgcgtcagccggtgatggtcgtcggcgcggcggtcattgacgtgatcgccgacgcttatgccctcccctggcgtgggtgcgatatcgaactgaaacagcagagcgttaacgttggcggctgcgcactgaatattgccgtggcgttaaagcgcctcggcatcgaagcgggtaatgccttgccgctcggtcagggcgtgtgggcggagattattcgcaaccggatggcaaaagagggcttaatcagcctgatcgataacgccgaaggtgataacggctggtgtctggcgctggttgagccggatggcgaacgcacttttatgtcattcagcggtgtggaaaatcagtggaatcgccagtggctggcgcgattaaccgttgcgcctggcagcctgctctatttttccggttatcaactggcctcgccctgcggcgaattgttagtggaatggctggaagagctgcaagacgtgacgccgtttatcgattttggcccacgtattggcgatatcccggatgcattactggcgcggatcatggcctgtcgacctttagtgtcgctcaatcgtcaagaggctgagattgccgccgaacgttttgctttatccgcagagataacaacacttggcaagcaatggcaggagaaatttgccgcgccgttgatcgttcgtctcgataaagaaggcgcatggtatttcagcaacgacgcttctggctgcattccggcatttccaacgcaagttgtagacaccattggggcgggcgacagtcatgcaggtggcgtacttgccgggctggcctctggtctgccactggcggatgccgtattactgggcaatgcagtggcgtcgtgggttgtcgggcatcggggcggtgattgtgcgccaacgcgcgaggaactactcctcgcacacaaaaacgtatagatcgctgcgacagtggctaatgctgtactcaataggccgttgctgttggtcaagcgccacttgcttgatcaccagcaccggtattttgctatctaactgaatatgtgactgaaactcggcatccggcatccgggcgctaacgcgggaacgcgtacgttgtgggtaaatgtgctggctgcggaaatagtcataaagtgaaatcccgatggcatcaacatcatgaattaaatgcgccggaacccacgattcctcaatcgataccgcttcttcatcgacatagcgaatacgcttaagcaaaaagacatcacttcctgcttcgaccgccagctgctgcgcgacttcttcgggacatttcacgacacgcttgttaacccatagcgtatcgggctttttcccgcgcaataccacctgctgagaaaaacctcgcgcttctttcaacgagtattcgaagatgttgttgatctgcgtgccgtaaccgcgcgaacgcgtcaccacaccctcttcttccagcgcctgcatcgccttgcgcaccgtaatgcgcgaaacgccggttaactgacttaaatcacgctcaccgggcaaaatattgccatgctccagcaccccgctgcgcacggcattttttaccgtttcggcaaacttaatataaagcggcgtgttatccgccgctaaaatacgctcgttcagttgggcaatcagctgggtatgcgcttgttccatttgtctttttcctgccgaggagtctggtgggagtatatcactgcttcttatttaaggcgtttctttaatcccatcaacgaatgcctgcaactcctccaccgtgccatgaaatacattaaaatccaccggaccattgatgccatctacctgtccacggtcggaatgctgccagaagcgccaggccatgccgtcattgtccggacgacgttgataatagtgagccacccaccacggatattcattgaaatagcccgccagattggtgtgataaaaaacggctcctgagtaaataatcggcttttttcccgtacttttttcgaccatttttagccactgacttactcgtttgcgtaattcttttgccgataattttccccgttcttctacgtccagtaccgcagggaaatcgccttgtgagaaatccaccgtttgcagaaataatcgtgcctgaaccggcgctgctaccgacggggagaaataatgatacgccccgcgcagcaggccattttcgcggcttagttgccagttacgcgaaaaatacgggtccaccagcttttcgccttccgtcgccttaataaaagcaaactgtaagcggataccgttgtcgcgcatttttgccacccgctgccagtcgatccgctcctgccagcgagaaacatctattccgtgaatggtgtaactggcaggaatgcgaatagcgaaagatttaaccgggcgataaccgtagaaatggatgtagtctgtaatctgaactgctgtcgaatagaaaaaattcaccgtctgacgcggataaattgcaacgatggaaattagcccaagagcgcataatagagaggtgagtttttttcgactggtaattcttagctgcattggtttcatccctgaatgtcagtgccaaaggctgacaataaccaaagcagctatagtacggtgctcaccaccaggcgtggaagtggtgaaccggaccaataccgtgaccaacttccagcgtgtcggcctgggctaatgctgatgaaagccagctttttgcctcctgtacggtgtcagcccagtttgtatggcgcgggcgtagtgcagccaacgccgcagagagcgtacaaccagtgccgtgggtgtttttggtcataatgcgcggtgcggtaaaccgttgttcaccctcgcgggtaaacagccagtccgggctttgctcatcatccagatgaccacctttcattagcactgcgccacagcccatcgccaacagcgatcgcccttgttccagcatttcctgttcggtgcgcgcgtgtggcgcgtcgagcaaggcggcagcttcgggcaagtttggcgttattaatgaaacctgtggcaataatcgactgcgcagcgtagcaaccgccgaaggtgaaagcagcgggtcgccgctttttgccagcataacggtgtcgagtaccacgttttggatctgataacgttgcaaccgttctgccacagcttcaacaatatcggtttccgccaacataccgattttagtggtgtcgattcgcacatcgctgaacaccgaatcgagctgggcggcgacaaaatcaggctcaatgcgatacaccgactgtacgccacgggtattttgcgccaccagtgcagtaataactgagcaaccataagcgccaagtgccgagaaggttttaagatcggcctgaatccccgcaccaccactgggatcagtaccggcaatcgtcagagcgttaattcgtttcatgcctgcacctcctgcgtcaattgccagagcgcatcaaggaaatgtggaacaaaactgcctggcccctcgcttctggcgactgcgcgctctccggcttgtttcatccagtgacaggcagatgcgacattttccagcgtatcgcctggtaacgcacagcaggcagcgacaaccgccgataatgcacagccagttcctaccactttggtcattaacggatcgccaccgtgaatgccaacggcgcgatggccatcggtaacataatccacctcgccagtgaccacgacgattgcgccagtttcccgtgccagtgtttgtgcagcgggtatcgcgttagctgcggcgtcagtggtatccactccccgtccaccattagcaatgccagctaatgccatgatttccgaagcattaccacgtatcgctgccggtttaaaagataaaagttcatgacaaaaatggcggcgataatcgagcgcaccaaccgctactggatcaagcgtccagggtgtttgagagctttttgcttgctcaacggcagcacgcatcgcctgagcgcgtggctgcgtcagtgtgccaacgttaatcaacaaggcactggcgatagccgcaaactgactggcctcttcggtttcgataaccatcgctggcgatgcaccgagcgccagcaaggtattggcagtaaaggtttgcaccacatcgttggtcatgcagtgcacaagaggggaatgttggtgaaaaaggtgtaacgcgtgcgcagattgcgctgaactcagcaggtcgacttgcatagtttgctcctgccataacgtgaagaagcaatgacctggtggtccgtgacttccctacgctggcattatccagatcaggtgatacgggtatttctcagccttcacgcagaagggcaccccgagtcgtttggttgcgatgataaatcgcagaggaggatggtaatgtccagcgcacgcgttgtaaacgaggaaaaacggcagttttacaatcgcgttaataaattatttgatatatgaatccagcaccttcagaacgacatccagatcttcttcacgttttagctcatccccctggtgaacgatgtgttccgtcagatgacctttaatcacttcccgcatcagaccgtttaccgcgccacggatagcagcaatctgttgtaaaactgcagcgcattcgtgcggctcgtcgagcattttcttgagcgccacgacctggccctgaatcttactggcacgcgctttcagtttctgtttatcacggattgtatgagacatggcaacacctggttaacaagaatatgaaaaatcatagcactattaatctactggggggtagtatcaggtactggggggagtagaatcagattgccgaattaatactaagaattattatcatgaccgaatttacaactcttcttcagcaaggaaacgcctggttcttcatccccagcgccatcttacttggtgcgcttcatggcctggaaccagggcactcaaaaacgatgatggcggcgtttatcatcgccatcaaaggcaccattaaacaggcggtgatgctcggactggcagcaactatttcgcataccgcagtggtctggttaattgcctttggcgggatggtgatcagcaagcgctttactgctcaatcagcagaaccgtggctccagttgatttccgcagtgatcattattggcaccgcgttctggatgttctggcgtacctggcgcggcgaacgcaactggctggagaatatgcacgagcatgatcatgcgcatcatcaccacgatcacgaagatcaccacgaccatggacatcatcaccatcacgaacatggcgagtatcaggatgcccatgcacgagcccatgccaatgacattaaacgacgctttgatggtagagaggtcaccaactggcaaattttgctatttggcttaaccggtggccttatcccctgcccggcagcaattaccgtgctgttgatttgcattcagttgaaagccctgacactgggcgcaacactggtcgtcagtttcagcattggcctggcgttaacgctggtcaccgtaggcgttggcgcagcaatcagcgttcagcaggtcgcaaaacgctggagcggatttaacactctcgctaaacgcgccccctatttttccagtctgttgattggcttagttggtgtgtatatgggcgtacatggcttcatgggcataatgcgataactcaatcctttaggcttgcatgttatcttcagcccaggatgattcttaaatcagctatttccgctgactctctgctcgctaaggatgcttttagggcatcctttcatttacactttttacgaaatcatgggatcactaacaaaatatcgcttgtcagttatattgtatggcaggaaagatatgcgactgatattacagatccccaaagtggagagtttatgaccattaaaaataagatgttgctgggtgcgcttttgctggttaccagtgccgcctgggccgcaccagccaccgcgggttcgaccaatacctcgggaatttctaagtatgagttaagcagtttcattgctgactttaagcatttcaaaccaggcgataccgtcccagagatgtaccgcaccgatgagtacaacattaagcagtggcagttacgtaacctgcccgcgcctgatgccgggacgcactggacctatatgggtggcgcgtacgtgttgatcagcgacaccgacggtaaaatcattaaagcctacgacggtgagattttttatcatcgctaaaaaaagccccctcatcatgagggggaaatgcagacaccttgttattttttattattagccacttgctcgtcttgcttgttattagtcgtatttcacgttgattaatgcggttgcctccagtgcgccagatttaattttatttgtatcgtagacgtagtaactggcagttatcggaattgaaaccgttgtatctgtaagttttgacttcgccgcaacttcctttaaatttgtatatcctttactgctgttagtgatatttaaaagtgtgactggcgaaccattactttcaagaataaatcctacgccattatcttccgcacctttcagtattgtgttgctgttggttaacaagtcagaacttgataaatacacctgcattttccgtgatgtttgattttgttgacctaataaatttttacaacgcagaataatatccccttatttactatttattgttgctttgttacctgtggctggtaattgtgaaacgggaatactgtctaaagtaattaataaatcgtccggtttgcaggttgtggttatcgggttgtatgacaatgtcagattaaaggaatagacacctgcattttgtgccaatgcatttctgtagctatttacacatgcatcccatgacttgccacctaataaacacagtagaaattgtactgcggcactcccgcgtgtcgatgatgaagcactggataatgtcgcaacaccattaatcatcactgaaccgccgccccccgcagaaacattcacttttgcattactggccgcaggtgtcaccgtaactgaataaccactggtgaaactggtctgattatttgacaacgtgatgttgtttttattggtccattcaaaatgtaaatttaattttatggtatcgttataaagtccaacaataatatccgacgggctcataggggtgatagtatttgtacttacgcatgacgaatcattaaaattatgctcatatgtcgccatttgtgtttgagtaagtgcaaaatccccctgaacaaccaagttgtgctgaacagataactcactataacatgccgcatagctcacaggcataaccatcatcattaatataaatagcattatgcgaatttccatagaaccacctgactattactggcaaatataatttctactttcatcaatctctttaccgaaggtgattgtgcatgaaagtccttgttgcttatcaattgccacattaaccgatggcggtacttcattggtgcgaataaataactggcttccctggccgacaacgccaatattatgaccatggatatcattgacttcataaccaaacattaatggttgaccatccgctcttaactctttaataaaccagggcttgcgctgatcggtatcaaaattaaccagtacaaccgcgccgcgataaggggcggcaattttccggttgccacgtaattctgcttcgctatcgctttgcgacacatccagcatcaggtgattttcccgataaggtgtcattccgtcgtataccaccactccattacggtttgttgtgcgatatttttgcccattgacataagcatctttaattcctggcgcattcatcacagcaaacgtttcggaaagacggttcgccagattaacgccccccgaccaggcgacaatgccccctgaaacactggctccagcctgtcgataagtactcgactgactataactgccattcactgtcgcaaccggcgcgttccaggtcaaattcgccccagctgtcgtttcatttccctgattctgataactcaggttgaccccatagttaaactgatcccggcttccaacggttcctgataatcccgtattatttgaggcaaacccctgatcatcaaacgtcgttgagttagacatatatatttgccgacgaggcgtcgtaacgtcatcaccccaatcaaagggaatcgatataaaaatattaaaacgtttctcttcatgatgattctcgtcatacgcctggcttgccgcgaggatatagcttatccgccgccagttattggaataactcaactgataatccttactgctgccgctacgcccccagtaatctcgccataacgtacttaaggacacagacccccagccttctggcaatgactggctcatattggcagagaagctatttttacggccaaaatcgttctggtaataatcggcaatgtcatagacatcgttttcatcacggcgataattatctttattgtttgcccaaacgtgatcattaaatgtccggtaatcacgcgatgaataacgccaggccgccagaccaaaacgcgtcgacgtttggctcacaaatttgttgtaggcaatttgataactttgcccgtcaaacacatcgccgttgtcttgtttactatgcgacttcgtggcatcgacggaaatggcaccaatgcgtgtattccagccagtccccaaagtaaacgcgtaataattattcgcgaccatcgagccaccatacagcgtcaataaattattaaaaccatactgataacccgcctggacaaaatcactttgtttgctcgccccttcaatatggctacgacccgccgcaaaatcatatttcgatacgccgggttgcagcatatttggcactgctgcataaggcaccagataggtggttaccgagccgtccgcctctttcacgctgacatcaagatctgctccaccaccggccaactgcaaatctgtaatcgcgaacgggccaggaggaacctctttctgataaaccacaaaaccgttctgttcaatagttaccagcgcattactctgagcaatcccctgcacccgtggcgtaaaattttgtttcgagttaggcaacatctgcatatcacgaaacaaccgcacaccgctgaagcgaacagaatcaaaaatatcgcttgatgtgtacatatcacccacgcgaagcgtgccgagaagttgggcaaatccacgttccagatacagggtattgcttttccacacccctggattgttatttgttttactgaaactggcatcagaatgcagttgccaccccagtaaatttaacccgctgttaaaacgtacatatgtactcttactattacccgacgctttatagtcactgtaatactgactcacataataagaggtataaaacgcattaataccccgctcccagttttccggtggaacatagccactttccagttcttccacccaggcctgcgggacactgaaatcgagacgaaaaaccccgatatcccaggtatagctcccaccctgaacaagttgctcaaatgttaaacattgcttaccgctggcgaagttatcgctattaatgcctaaccgcttgataacttctattgataaacatgtttcttgcgggttgtctttaacaataatctcatatttcccgcgccattgcttattgacataaatatcgatgtcatactgccccggtaagggttgattatcatcaagacgaatatttgcaacctgctggtctttcattccacctatcataaaatgggtatcaaaggtttcttcagctgcataagcttcaatgccgagcaataacgctacgattgctgatgcaagtggggtcattctcaacataggcagctcctgcaattaaattttgtcactaatatagttgccgtggtcatcgataatggtcagataccagttatttgcattattacttttgacattaacactctgactttctaagggggcaatcattatagtttcataattgactttgacattattagctttgacatccgaaatcgtcacccaattagctgagtcattttttatcaccaatccattgccactgcgacttaccagtaactttttaaaggtcgctttatttaccggagcaatacccgccgggcggtaaaacaatttgattctgttttgcatcgcaaacttcagtgcattcttaccttcttgttctggactatttggtggaatatccagaacattcagataaaaaatgctttctttattagtgggcagtttattcggcataattttgatttttacttgctgcccggaatttgcccctatttttgccactggtggcgttaacatgaaaggaacctgaattttttctggtggtaacgacgtatcgccatcatcaatccacgcctgcagcagcgaagaacggtttccctggttcatcaactgcaccataacttctttattttctgccgggtaaataatgcgcgtcccgtagataacaattccggcatgtgcaggaaggaccatagaaaaaatgagtaaagataataatcctttcatcttaatgcctcttaaattaaaaagccgccatggggatagcggccatgtttattacctggagaaacttgcaattttatttattaatcctgcgccacacgcataaccagagaagataacacatcacctgattgcactgagttatctgtcagtttcaggtattttgctttaaacggaatagcatattgaccttccgctgttttataactctcaatgttaaaaggtgcagaaacatccaggacatcgctgttatcacctaaatagagatagtaacccacggtatcgttgctactggctatcgccttatcgttaccggttattttatcgttggtaatcaacgagagttttacaccagcaacttctttcgggcagctaatttttaacatgctgctggttacaccgactgcatcatcataggtagaatatttagctttaccttcaaagacagtggttggtacagtcggcatattaatacttactgaatcaccacccgcttcgaatttacacggagattctgcaatattccccttaatagttaatgttccggtatcaacgtctgcagcaaatactccagcgctcataaaaaaagaagaaaagacagcggcagcaataattgaacgtttcataatatgttccttaataaaatttatttttggttgttaagagtctgtatctcttggaaacaaatttctcacatcaaaaaagttgccgcaatgtaaacacattgttttattgatttaaaacaaattaaccattgcaatataaatacaacaaatatttaagagtattaactatttatcgcatctatcaattaatgtagatttatgtaaatggtattgttgatatcaataaaaaagccgaaatcatttatataaatgatttcggctttctaaatgcaattaaaatcaggttgccaaattaatcgtagcgatttaacacgattcgacgattgctatcgctacctgcaacaaccacttctgtcgttacacctttgacgggcgaagaaaacagatgacgggtgtcaacattatacgttaactgaccacaatgctgttgtggttgactattaaccatagccatactgcatgttgggggactgatcctgccattaatcgttaatgtggcagtctctgaagagaatgcgggagaagccaatccataggcaagaaaaataattcctgacagccaatacttattcattgaacgttatccctgtagtaaaggttatgcctggatagaatgagtgcataacaaactatagctgtacatccactacacagccacgaaggatgataatgaagcattgcctgtatgatcaatcgactttgtagagtttcggacgaaggtccgcagaatattcgcagtattaaataagtgttcattaatgcggcaaaaactaatacaccgcatcaatgtaacatctctgcggtgtatgaagaataaccagaatggttaataggcgttagaccgcgcggaaggaaatctcgcctggaatgacttcaccctgccagtagagctgagctgcaacgcggtcagccagctggcggtagatagcggtaaattcgctctccggacggctgataaccgttggcgtgcctttatcgagatcctcacgtaaggaaatgtgtaacggcatctgccccagcagctgtgtgtggtatttttcagccagtttctctgcaccaccggtaccgaaaatcggttcatggtgaccacagttactgcaaatatgcacactcatgttctcgacaataccaagcaccggaacctcgactttctcgaacatcacaatgccttttttcgcatcgatcaacgcgatgtcctgcggggtggtgaccacgactgcaccagttactggaatgttttgcgccagcgtcaattgaatgtcaccggtgcctggcggcatatcaagcaccagatagtcgagatccggccacaaggtttcctgcaacatctgcattaacgccttgctcgccatcggtccacgccacaccatcgcattgtcgtcagtgaccagataaccaattgaattggttgccaggccatgagacataatcggtgccatatgggtaccgtccggcgaagttggacgctgattttctgcgcccagcatggtgggaattgatgggccgtagatatcggcgtccagaatgccgactttcgccccttccgccgccagtgccagcgccaggtttaccgccgtggaggatttacccacgccgcctttaccggaactgaccgcaatgatgttcttcacaccattaatacccggctgattcttcacgcgttttaaggtggcgatattgtgcgacagtttccagtcgatagctttcgccccggtgatacgcagcagttcggcgctacattgctcttttaactcttcaaacgcgctatgccagacgaatggcataaccagttccacatgcaacgtgtcgtccatccaggcgacatggtgcaacgctttcagcgtggtgaggttatgcttcagggttgggtgctgaaaattggccagtgtcccggcgaccattgcgcgcaaggcttctggtgatttggcctgggattgttcgttcatcccgactccttttttgtatagataaaccatcagctgatagtttacctgaagaatatagagaagtacttacttaacattttcccatttggtactatctaaccccttttcactattaagaagtaatgcctactatgactcaagtcgcgaagaaaattctggtgacgtgcgcactgccgtacgctaacggctcaatccacctcggccatatgctggagcacatccaggctgatgtctgggtccgttaccagcgaatgcgcggccacgaggtcaacttcatctgcgccgacgatgcccacggtacaccgatcatgctgaaagctcagcagcttggtatcaccccggagcagatgattggcgaaatgagtcaggagcatcagactgatttcgcaggctttaacatcagctatgacaactatcactcgacgcacagcgaagagaaccgccagttgtcagaacttatctactctcgcctgaaagagaacggttttattaaaaaccgcaccatctctcagctgtacgatccggaaaaaggcatgttcctgccggaccgttttgtgaaaggcacctgcccgaaatgtaaatccccggatcaatacggcgataactgcgaagtctgcggcgcgacctacagcccgactgaattgatcgagccgaaatcggtggtttctggcgctacgccggtaatgcgtgattctgaacacttcttctttgatctgccctctttcagcgaaatgttgcaggcatggacccgcagcggtgcgttgcaggagcaggtggcaaataaaatgcaggagtggtttgaatccggcctgcaacagtgggatatctcccgcgacgcgccatactttggttttgaaattccgaacgcgccgggcaaatatttctacgtctggctggacgcaccgattggctacatgggttctttcaagaatctgtgcgacaagcgcggcgacagcgtaagcttcgatgaatactggaagaaagactccaccgccgagctgtaccacttcatcggtaaagatattgtttacttccacagcctgttctggcctgccatgctggaaggcagcaacttccgcaagccgaccaacctgtttgttcatggctatgtgacggtgaacggcgcaaagatgtccaagtctcgcggcacctttattaaagccagcacctggctgaatcattttgacgctgacagcctgcgttactactacactgcgaaactctcttcgcgcattgatgatatcgatctcaacctggaggatttcgttcagcgtgtgaatgccgatatcgtgaacaaagtggttaacctggcctctcgtaatgcgggctttatcaacaagcgttttgacggcgtgctggcaagcgaattggctgacccgcagttgtacaaaaccttcactgatgccgctgaagtgattggtgaagcgtgggaaagccgcgaatttggtaaagcagtgcgcgaaatcatggcgctggctgatctggctaaccgctatgtcgacgagcaggctccgtgggtggtggcaaaacaggaaggccgcgatgccgacctgcaggcaatttgctcaatgggcataaacctgttccgcgtgctgatgacttacctgaagccggtactgccgaaactgaccgagcgcgcagaagcattcctcaatacagaactgacctgggatggtatccagcaaccgctgctgggccacaaagtgaatccgttcaaagcgctgtataaccgcatcgatatgaagcaggttgaagcactggtggaagcgtctaaagaagaagtgaaagcagctgccgcgccagttactggcccactggcagatgatccgattcaggaaaccatcacctttgacgacttcgcaaaagttgacctgcgcgtggcgctgatcgaaaacgcagagtttgttgaaggttctgacaaactgctgcgcctgacactggatctcggcggtgaaaaacgcaatgtcttctccggtattcgttctgcctacccggatccgcaggcactgatcgggcgtcacaccattatggtggccaacctggcaccgcgtaaaatgcgctttggtatctccgaaggcatggtaatggctgctggtcctggcgggaaagatatcttcctgttaagcccggatgctggtgctaaaccaggccatcaggtgaaataatccccctttaaggcgctgcatcgacagcgccttttctttataaattcctaaagttgttttcttgcgattttgtctctctctaacccgcataaatactggtagcatctgcattcaactggataaaattacagggatgcagaatgagacactttatctatcaggacgaaaaatcacataaattctgggcagttgagcaacagggaaacgagttgcatatcagttggggaaaagttggcaccaaagggcaaagccagataaaaagtttttcagatgctgcggcagcggcaaaagcggagcttaagctgattgcggagaaggtgaagaaggggtatgtggagcaagcgaaggataattctttgcaaccttcccaaacggtaacgggctctctcaaggtagcggacttatccaccattattcaggaacaaccctctttcgtagcagaaacccgtgcgcctgacaaaaatacagatgctgttttaccgtggctggcgaaagatattgctgtcgttttccgcccgaagttgtacacaccacgttaagtcatcgccgctttcccggagttcctgttcagcaagcagacaaattgacccaattacgtcgcttagcctgtagtgtgtcgcaacgggataataaaacagccacatttgacttcagcgcctgttctttagaatggcaaaacaccgtcgcccaggcgatcagtcagatcgacggcctgaaaacaacacagctaccatcaccagtaatggctgtactcacggcacttgaaatgaaatgcacaagatataaagtgcgtgaggatgttatggatcagatcgtccaggaaggcggtctggaatatgctactgatgtaataatacaccttcaacagattgatattaaatgggattatgcgaataatgtcattattattctgccgtctggcattgcacctgactacttggagcaatattccagatttgaattacgcctacgtaaacatttatcactggcggaagagtctctctggcaaaaatgtgcacaaaaacttattgccgcaattccacatattccagaatggcggcaaccattaattgctttgttattacccgaaaaaccagaaattgcacatgaaattgcccagcgtctactgctgccaacttactgatttagtgtatgatggtgtttttgaggtgctccagtggcttctgtttctatcagctgtcctcctgttcagctactgacggggtggtgcgtaacggcaaaagcaccgccggacatcagcgctatctctgctctcactgccgtaaaacatggcaactgcagttcacttacaccgcttctcaacccggtacgcaccagaaatcattgatatggccatgaatggcgttggatgccgggcaactgcccgcattatgggcgttggcctcaacacgattttacgtcacttaaaaaactcaggccgcagtcggtaacctcgcgcatacagccgggcagtgacgtcatcgtctgcgcggaaatggacgaacagtggggctatgtcggggctaaatcgcgccagcgctggctgttttacgcgtatgacaggctccggaagacggttgttgcgcacgtattcggtgaacgcackatggcgacgctggggcgtcttatgagcctgctgtcaccctttgacgtggtgatatggatgacggatggctggccgctgtatgaatcccgcctgaagggaaagctgcacgtaatcagcaagcgatatacgcagcgaattgagcggcataacctgaatctgaggcagcacctggcacggctgggacggaagtcgctgtcgttctcaaaatcggtggagctgcatgacaaagtcatcgggcattatctgaacataaaacactatcaataastgvatdvgattaaaggtatcactatggcgcaaatggaactggtgatgaaagccgctggttttaaagaagtgaaataatctgtcggcggccatgtttcgcatggccgccatacccgtcttagcttttcttcacatgctggcgcgctgccagtccacgcagaaaataacgtaaaaattgatcgccgcattcgcggaagtttttatgatccggtgcgcgcatcatcgctgtaatttccggcatcgaaacgcggaactgctgttcggtgaggatagccagaatgtcatcggttttcagcgaaaacgcgatgcgtaatttttcagcacgatgttgttattaatgcgacgttccggctccagtgccggagcagactcatccttgccgcgtttttcataaatcaggccgttgaggaatgacgacaaaacaatgtccggacaacgctgaaaaccctcttcgtcttctttacgtagccagacggcgatctgttccgcggtggcttcgacattacccagcgccagaatacgcaccaggtcattattattggctttcaaaatgtagcgcacgctgcgcagaatatcgttacttagcatgaggccttcaggtgttgatgaggcaaaaagccattttagcagtcttttacaggccaatcgcctcttttaagcttttcagataacggcggctgaccggcacggttaagccattacgcaaaatcaactcggcctggccgttatcttccagacgaatctcctgtaaatgcgcgagattaaccagatactgacgatggcagcgcagtagtggtgtacgactttccagggtacgtaatgtcaattcggtaaagccctctttcccttcgtggctggtaacgtagacaccgctcatccgactgctgacaaatgccacatctttcatttgcagcaaataaatccgactatgccccgtacaagggataaatttcagcgcctgttgattttccggtaacagcgaaacatcctgcttgctgcgctcctgacgcaatcgcgccagcgttttctccagtcgcgcttcatcaattggcttcagcagataatcaaaagcatgttcttcaaaggctttaatagcgtattcgtcaaacgcggtgagaaaaacaatatacggacgatgttccggatcgagcatccccaccatttccagaccactgatgcgcggcatctggatatcgagaaacagcacatccgggcgcagtttatgcaccgcgccgatcccttccacggcgtttgaacactctccaacgatttcaatatcgctctgctcctgcaaaaatacgcgcaggttctcccgtgctaacggttcatcatcgacaattaagactttaatcatgcctcgtccctccatggtagtcgtaacgttattcgggtgtaactatcaggctcacaggcgacgcttatcccatagtcatcgccaaaccgttcacgtaaacgcttatccaccagattcatccccagcccactggcattggttaccggttgatacaaaccggcattgtcttcgatctccagcatcaaatgttgcccctcacgtcgggcgctgattgccactcgccctgtatccagcagttgtgatgtcccatgtttaatggcgttttccactatcggttgcagggtaaacgcgggcaattgctgctgggataattcttgcggaatagcaatgttgacctgcaaccgcgactggaagcgcgccttttcaatttgcagataagcgttcacatgttcaatttcgtcggcgagagtaacaaactccgaaggccgctttaagtttttgcggaaaaaagtggaaagatactgcaccagctggctggcctgttcgctgtcgcggcggatcaccgctttaatggtgttaagcgcattaaacaaaaaatgaggattcacctgggcgtgaagcagtttgatttctgactgggtgagcatcgctttttgccgctcatattgcccggcaagaatctgcgccgaaagcagttgcgcaatcccctcgcccagcgtgcggtttattgaactgaataaacggtttttggcttcatacaatttgatggtgcccatcacgcgctgattttcgccacgcaacggaattaccagcgtcgaccccagtttgcattgcggatgcaaagagcaacgataaggtacttcgttgccatcagcgtagaccacttcaccggtttcaatcgcttttaaggtgtaagtcgaagaaatcggtttgccgggtaaatggtggtcgtcaccaattccggtaaaggccagcaatttctctcgatcggtaatcgcgactgcaccaatatccagctcctgatacagcacctgagccactttcatgctgttcacttcgttaaacccctgtcgcaaaatgccttccgtcgaggctgccactttcagcgcagtggcagaaaaagcagaagtgtatttttcaaacatcgcgcgtttatcgagcaatatacgcataaacagcgccgcgccgacggtattggtgaccatcattggtgcagcaatattactcaccagacgcaccgcatcttcataaggtcgggcgatcgcaaggatgatcagcatttgcaccatttcagcgacgaacgtgacggcaccggcggtaatggggttaaagactttatcagtgcgcccgcgacggatcaggatgctgtgtaccaggccgccgagcaatccttcaacgatggttgagatcatgcaacttagcgcggtcatgccccccatcgaatatcgatgtaagccgccggtcagaccaaccagcccaccgacgaccggaccgccgagtaagccgcccattaccgcgcctatcgcacgggtattggcaatagaatcgtcaatgtgcaacccaaaccaggtgcccatgatgcagaaaatggaaaagacgatgtagcagagaaatttatgcggcagacgaaccgtgacctgcattaacggtatgaataatggcgttttactcattaaccacgcaatgactaaaaaaacgcacatctgctgaagcagcagcaacaccagattaaaatcgtacatacccgcaaaccacacttccctttaaaacgcgtaacatacattgcctgcgtttaactttctttgaactcttgcagaaaaatgagaattcgtgagtacgatcactcaaaatcgcctggcaaaaataaaatcaccctatagatgcacaaaaaacgggcaaaactacctggttcgcaaaactgcgtctaaagttaaaccgggacctcgcgagcaagggtgagacgatggcgctttacacaattggtgaagtggcgttgctttgtgatattaaccctgtcacgttacgcgcgtggcagaggcgttacgggttgctgaaaccgcaacggacagacggcggtcatcgactgttcaacgatgccgatattgaccgtatccgcgagatcaaacgctggatcgacaacggcgtgcaggtcagcaaagttaaaatgctgctcagtaatgaaaatgttgatgtgcagaacggctggcgcgatcagcaagaaacattactgacctacctgcaaagcggcaatctgcatagcctgcgaacgtggatcaaagagcgcggtcaggattaccccgcccagacactcaccacacatctgtttattcctctgcgccgacggcttcagtgccaacaaccgactctccaggcgctgctggcgatcctcgacggcgtactgatcaactacatcgccatttgtctggcttcggcacgtaaaaaacagggtaaagatgcgctggtggttggctggaatattcaggataccacccgtctgtggctggagggctggattgccagtcaacaaggatggcgcattgatgtcctcgcccactcgctcaatcaactacgccctgaactattcgaaggccgtacattgctggtgtggtgcggtgaaaatcgaacctccgcccaacagcagcaactcaccagttggcaagaacaaggccatgatattttcccactcggcatttaatgattcgttaacaaatgcgctttactgtacaatcctttcgttaacataaggagtgcaatatgcgcatagctaaaattggggtcatcgccctgttcctgtttatggcgttaggcggaattggtggcgtcatgctcgcaggttatacctttattttgcgtgctggctaagcgcctgcaccagcctttcaaacaggcggtctgcgatgatcgccgccagtgccaccagtaacgccccctggatcacatacgcggtattaaatccgctaagcccgatgatgatgggcgtacccagcgtgctggcccctaccgttgaggcgatcgtcgccgtaccaatgttgataatcaccgaagttcgcacgcccgccagaatcaccggagccgccagcggtagctcgaccttacgcagtcgctgaccacgactcattcccatacctttcgcaacttctgtcacgctggcatcaatcgctcccagcccggcaagtgtcgcctgcaggacgggcagcacaccgtaaaggatcaaggcgataatcgctggttgcagaccaaagccgatcaccggaacggcaatcgccagcactgcgacaggcggaaaagtctgtccaacggcggcaatagtttccaccagtgggcgaaattccgcgccccacgggcgagtgacagcaattccggcaccagtgccaatgatcaccgcaaacaaactcgaaattcccaccagccagaaatgagccagtgccagagctgcaaaactttcttgctgataaacgggtcgtggcagttgtgggaacaaggcagcaaacagcggctggctgtaaggcagccagaaaatcagtgccacaaacaaagcaatgagccagaacagcggatcgcgcaacatcttcatacgcttacgcctccaccagcagatcctgaaaatgcagcgtaccgcaaggctggccctgcgtgttcatcaccggcagcacctcgcatccccgcgcgacaaacagggagagcgcatcgcgtagcgtcatctcttctgccagtgcctcaccttctgcccgttcttcgcgacgcacgtaatccgccacactacgtaacgaaagcaggcgcacccccagttcactacgtccaaaaaactggcggacaaaatcattcgccggacgagtcagcatcgtcagcggattcccctgctgcaccacttcaccgtgatccatcaataccagatgttctgccagccttagcgcctcatcaatatcatgagtgaccagcacaatagtgcgccccagcaaacggtgaatgcgcgtcatctcttgttgcaacgcgccgcgcgttaccgggtccagtgcgccaaaaggttcatccatcagtaagacttgcggatcggcagccagtgcgcgcgccactcccacacgttgctgctgaccaccggaaagctgatgcggataacgctcacgcaaatttgactccagccccagtagcgtcattaattcgtcgatacgatcgtcaatccgtgcccgcgaccatttttgtaattgcggcacggtagcgatgttttgcgccacgctccagtgggggaacaggccaatagattgaatggcatagcccatccggcggcgcaactccagtactggcagcgagcgaatttcttctccggcaaagcggatctctccgctgtcatgttccaccaggcggttaatcattttcaaggtggtggatttgccggagccagatgtgccaatcagcaccgaaaaactcccttcctgaaaattgagattaagatcgttaacggctttttgtgcgccaaacagtttgctgacatggctaaattcaatcattacgtttcaccttcagcagtgcgataagcaaatcgaacagggcatcgatcagcaccgccagaacaattaccgggatcacccccagcaacactaaatcaatggcgctgcttagcagcccctggaaaaccagcgcaccaaaaccgcctgcgccgattaacgccgcaatcaccgccatacctacagtttgcaccatcaccacccgcaggctgcgcagaaataccggtaacgccagcggtaactgaacatgcaggaatcgctgcgccccgctcatccccatcgctctggcgctctccagcacatcgcgcgggatctggttcaagcctactaccacgccgcgcaccagcggcagcaaggcatagagcaccagcgcaatcagtgcgggtgtcattccggttcctgctatgccgagcttccccagccacggaaaggccgtaaccagcgcggcaagcggcgcaatcaacaggccaaagagcgccaccgaaggcacggtctgaatgacattgagcagagaaaaaattgccccctgccgcgcagtggaaaagtagcaccagatgcccaacggcacaccaatcactaacgcaggcagcaccgcaccaaacagcaacgtcagatgttgtgccagcgcgtcgtcaaacacatcctgacggttggcgtattctttcattagtgagagatcgttaagcgtgccggagtacagcaaccacagcggaataatggcaatctgcatatgcaacaaccagcgccacagcggatgcgtggagattcggcggatggcatcgctacaggccagcaatgccagcgccgcagccagccagaaaccactgccgaggctggtacgcgccagcgcactgccattttgcgccagttgggtcgccgcctttccagctccccacaccaacaatacgaagacgaattgcgccagaatgagtgcacaaatgctgccttttttagcggggacaaaacaggctgtcagccaggcgcaaccaacgcccaccagcatccagatcgtttgcggccacagttgccagagatgacgcccttcacccgagactaaacgattaggcgcgtagctgataaacggcagcgctgctgcgattgccgtcagcaacagcagcagcgccagaacaggattaatacgtagataagtcacgggaaattacttcgcccaccctttttgtttcaggtagtcggcagccacttttttggcatccagtccttccactgcaatgctggcattcagttgctgcaatgtttttgcatcgaggctggcgaagactggctgtagccactgtgccatttgcggatactccttcaacaccgattcacgcaccactggtgcaggcgcatagataggttgcacgccttgcggatcgcttaaggtttgcagccccagcgccgctaccgggccgtcagtgccgtaagccattgcagcattaacgccagaggtttgctgggcagcggctttgatcgtcaccgccgtgtcgccaccagccagtgacagcaactgatcctgaccgagcttaaagccataggctttttcaaacgcgggtaacgcatcggcgcgttcgataaactctgccgaggctgccagtttgaaggtgccgccctcttgcagataacgactcaggtcggcaagcgaagtgagtttatttttctctgccacatcctgacgcacggcgatagtccaggtgttatttgcaggcgcgggcgtcagccagattaacttgttgtgctccgaatcgagctttttgactttctcgtaaccttgctgcgcgtttttccacgctgcatcgttttcatctttaaagaagaaagcgccattgccggtatattccggatagatatccagttcaccggaagtaatcgccccgcgcaccacaggagtcgttccgagttgcactttattcaccgtcggtacgccgtggctttccagcacctgcaaaatgatattgccgagtagcgcaccttcggtatcgatttttgaaccgactttaacgggggaagccgcctgtagcggcaggctcacggctgccaacataaccagtgaacctgcccagagctttaagagtggcatgatgctttcctcattcttttactgttgttttcagcgaattaagagaaaagcatagttgataatggcggggttagcttgagcggaaggattcagttgcagaatcagataaatacttaagaggcatattcggtccggcgtttcctgccggatgcggcgcgagcgccttatccggcctacaaagggcgcaaacgtcgcgcccttactaaagcattacagcaactcaaactcgcctttcttaacgcgtgcggaatcagtgccgataaatacattgaacttgccaggctcggcgtcatatttcatctgttgattccagaacttcagcgcctcaatatcgatcgggaagctgacagtctgagtttcgcccggtttcagggtgattttctcaaagcctttcagctgtttcacagggcgactcatggaagccgtcacatcctgcaagtacatctgcactaccgtggccccctcgcgcttaccggtgttcgtcacctgcacgctggcagtcactttgccgtcacgcttcatggtcggcgcagaaagtttcacatcagagacggtgaaagtggtgtagctcagcccatagccgaacggatacaacgccccgttagcttcatcaaaataacgcgaagtgtatttgttcggcttgtcggcattatacgggcgaccggtattcagatggctgtagtacaccgggatctgcccgacagaacgcgggaaggacattggcagcttgccggacgggttgtaatcgccaaacaatacatcggcaattgcattaccgccttcagtccccgcaaaccaggtttccagaatcgcatcagcctgctgatcttctttcaccagcgccagcggacgcccgttcatcagcaccagcaccagcggtttaccggtggctttcagcgccgcaatcaagtcacgttggctttgcggaatagtgatatcggtccggctggaggcttcgtgcgccatcccctgtgcttcaccgactacagccaccaccacatcagattgtttcgccgtctgcaccgcttcatcaatcatctcttgcggcgaacgcggatcgactttgaccgcttcttcatactgattcaggaaatcgataatgcctttgtcactggtaacgttcgcccctttggcatacagcactttaccgttttcaccgacggaatttttaatcccagtcagtacggtcacggattgatcggcaacaccggctgcggaccagctgcccatcacgtcacgtttactgtccgccagtggcccaaccaccgcaatggtggccgattttttcagcggtaacgtttcgagacggtttttcagcaacaccaggctttcgcgcgccacttcacgcgcttctttacggtgcaggcggctttcggcattagtgtcaaccgggtcagactctttcggccccaaatggctgtatgggtcgttaaacaatcccatatcatatttaacgttcagtacatggcgggcagcatcgtccagctcttccatcgtcactttgccggatttgatcaacccaggcagatacttcgagtaatactcgtcgctcatactcatgttgattccggatttcagcgccacgcgcaccgcatcttccgggtctgccgccgtgccatgtttaatcagctctttgattgcaccgtgatcggaaacggtgatgcctttaaagccccactggtcgcgcagaacatctttcagcagccaggaatcggaggtggctggcgtgccgttcagcgagttcagcgccaccatcaccgcgccgctgcctgcgtccagccccgctttgtacggcggcatataatcattaaacaggcgctgcggactcatatcgacggtgttgtactctttaccgccttctaccgcgccgtatgcggcaaagtgtttgacgctggtcatcaccgagtagcgatctgccgggcttttaccctgcatcgcttccaccatggttttacccattgttgaggtgagatacgtatcttcgccaaaaccttcggaagcacgtccccagcgcggatcgcgcgagacatcgaccatcggtgcccaggtcatattcaggccatcatctgccgcttcataagcagagacacgtccgaccgttttcactgcatcgaggttaaaagacgaggccagaccgaggctaatcgggaacaccgtgcgctgaccgtgcagcacgtcgtaagcaaagaaaagaggaattttcaggcggcttaattccatcacctgatcctgcatggcgcggatatcctgacgggttacggtgttgaaaatcgccccaacctgaccgtctttgatcatctcgcggatcgcctctttcgggttatccgggccgacgctgattaagcgcagctgaccaattttctcatcaactgtcattttcttaagcagttcggtgacgaacgcatcccgcgcttcgggcgttaatggatggttgccgaataaatcatccgccagtgctggctgcagggccagactcaccgcgattcctactgaacatagccatttcatatggatttttcttcctctgttgcccgacgaggcagcgaaaatggtgcaaaaaccgtagtttgccataagcatgatggagagagaaaaagaatgctcagtttattgtctgaattttcaaaatattcactcgctgaattgtcatacaaggcgctattctagtttgtgatattttttcgccaccacaaggagtggaaaatgtcttccatgacaacaactgataataaagcctttttgaatgaacttgcccgtctggtcggtcattcacacctgctcaccgatcccgcaaaaacggcccgctatcgcaagggcttccgttctggtcagggcgacgcgctggctgtcgttttccctggctcactactggaattgtggcgggtgctgaaagcctgcgtcaccgccgacaaaattattctgatgcaggctgccaatacaggcctgaccgaaggatcgacgccaaacggtaacgactatgatcgagatgtcgttatcatcagcaccctgcgtctcgacaagctgcacgttcttggcaagggcgaacaggtgctagcctatccgggcaccacgctctattcgctggaaaaagccctcaaaccgctgggacgcgaaccgcactcggtgattggatcgtcgtgtataggcgcatcggttatcggcggtatttgtaacaactccggcggctcgctggtgcaacgtggcccggcgtataccgaaatgtcgttattcgcgcgtataaatgaagacggcaaactgacgctggtgaaccatctggggattgatctgggcgaaacgccggagcagatccttagcaagctggatgatgatcgcatcaaagatgacgatgtgcgtcacgatggtcgtcacgcccacgattatgactatgtccaccgcgttcgtgatattgaagccgacacgcccgcacgttataacgccgatccggatcggttatttgaatcttctggttgcgccgggaagctggccgtctttgcggtacgtctagataccttcgaagcggaaaaaatcagcaggtgttttatatcggcaccaaccagccggaagtgctgaccgaaatccgccgtcatattctggctaacttcgaaaatctgccggttgccggggaatatatgcaccgggatatctacgatattgcggaaaaatacggcaaagacaccttcctgatgattgataagttaggcaccgacaagatgccgttcttctttaatctcaagggacgcaccgatgcgatgctggagaaagtgaaattcttccgtccgcattttactgaccgtgcgatgcaaaaattcggtcacctgttccccagccatttaccgccgcgcatgaaaaactggcgcgataaatacgagcatcatctgctgttaaaaatggcgggcgatggcgtgggcgaagccaaatcgtggttggtggattatttcaaacaggccgaaggcgatttctttgtctgtacgccggaggaaggcagcaaagcgtttttacaccgtttcgccgctgcgggcgcagcaattcgttatcaggcggtgcattccgatgaagtcgaagacattctggcgttggatatcgctctgcggcgtaacgacaccgagtggtatgagcatttaccgccggagatcgacagccagctggtgcacaagctctattacggccattttatgtgctatgtcttccatcaggattacatagtgaaaaaaggcgtggatgtgcatgcgttaaaagaacagatgctggaactgctacagcagcgcggcgcgcaataccctgccgagcataacgtcggtcatttgtataaagcaccggagacgttgcagaagttctatcgcgagaacgatccgaccaacagcatgaatccgggaatcggtaaaaccagtaaacggaaaaactggcaggaagtggagtaaaaattacggatggcagagtatcgccatccgaattcacttaatcgttctgtgccgtctgccccgccgccgccatttgggcggctttttgttttttatagctcaacgctgctgccggcacaggcatcactttaccggtttcaatccaggtacgcaggcggctggcatcggcaaaatgggtatatttgccaaacgcgtccatcactaccagcgccaccggtttattattgataaccgtacgcatcaccagacaatggcccgccgcattggtaaagccggttttggttaactgaatattccagttatcgcgatacaccagatgattagtattgcggaacggcagcgtatacgtcgggttagagaaggttgccatatcttcccgggtagtacttaactgcccgatcaacggatactgtttgctggcaatgagcagtttggttaagtcacgggcagttgaaacgttatgcaccgacaatccggtaggttcaacaaagcgcgtgttgttcattccgagcgatttcgctttcgcattcattgccttaataaaggctttgtaaccaccgggataatggtgcgcaaggcttgccgccgcgcggttttctgaagacatcagcgccagcaacagcatatctttacggctgatttcgctattcagtcgtacgcgcgaatagacccctttcatctccggcgtctggctgatatccacttttagtttttcatccagcggcagtcgtgcatccagcacaaccatcgcggtcattaatttgctgatagacgcaatcggacgcaccagatccgggtggttcgaatagatcactttgttggtattcagatcaacaatcatcgcgctaccggaggcaatttccggttgtgaagcggtggtagcggctgccgttttcgcaacggcctgcggtgccaaaggcacagccagcatcagggccaggctaaataaagaaactcgaaatttcggcatgatgagcattcagatagtggttcacgcgcacgggttgcgcaccgccggagtaaggatttactgaggctagcgacgccatcataacgagcaaaaagtgcgatcgtcaaaggagaatcgtgaggaaatgctgcattgctgacatttacgccagcaatgcaatgtcaaagaactttctagaacaggcgatacccgtagccccatagtataacggttagggcgagcagcacttccagtaccagcacgccaatcgccagcgtcgaactggagaagctaaggccttcctctttgttgatattcaggaagctcggaataccaaggtaaagcaggtagccggtgtaaaacagcgccaccgtgccgaccagcgcacacaaccagaccagcggataaagcgccaccagaccgcttaaaaacagcggagttgcaacgtagcccgcgaagaccatgcagtgcgcaagtgacggacgctgcgggtaattgcgcgccatccaccagatgacccgccccatcaccgcgaccccagccagcataacgccgtaaaacaagacagccagcgccagtccggtaaaccaggataacttcaggatagtgccatcgccaaaattccagccaatctgtgtagtgccaatgaaggcgcaaatcaccggaatcgccgccatcagcaaaacgtggtgggtgtaatggtgagaaatcgtttcgttttcgcgattaatcacctgcatttcacgatcgggatgggaaaacagtccccagacatggctcataccgcccccttgttgtgagttcatgaacctgacagttcaagtataagtcagcttgtgattattttttgttcgcccatgtaattttcactgtctgatgaacgtcctttttcagcgtgaatgattcacagggtgtatgcttactggcaaccaaagggagacagactggcctatggatctcaatacacttatctcacaatatggttatgccgcgctggtgatcggtagcctggcggaaggtgaaaccgtgactttgctgggaggcgttgcggcgcatcaggggctattaaagttcccgctggtggtactttctgtggcgcttggcggcatgattggcgaccaggtgctctatctgtgcgggcggcggtttggcggcaagctgttacgccgtttctcgaaacatcaggataaaattgagcgggcgcagaaacttatccaacgccatccgtatctgtttgtcattggtacgcgctttatgtatggctttcgggtgattggcccgacgctgattggtgccagccagctgccgccgaaaatctttctgccgctgaatattctcggcgcatttgcctgggcgttgatttttaccactattggttacgctggtggtcaggtgattgcgccgtggttgcacaatctcgaccagcatttgaagcactgggtctggttgattctggtcgtggttctggtggtgggcgtgcgctggtggctgaaacggcgcgggaagaaaaagccggatcatcaggcgtaaaaccattgccctgggtaaggcgttcgcgccgcatccgacatccggtgcaccatgcctgatgcgacgcttgtgcgtcttatcatgcctaccaaaattttacccattgaaataaccacgcacctcactgcgctattctgggttgaactgcggattcgccaacataaagccgccatccactatcaacgactgcccggtggtgtaatttgcgccctctgagcacagccacgctaccaggctggcaatctcatgcgttgcgccaaaacgccgcagaggaatcgaaggctccgcgtcgggcttcacgtcgctgtcatccatgccattcattggcgtggcgatcgccccaggcgcgactgcgttcaccaaaatcttatgcctgaccagctccagcgccatcgttttggttaacccgccgagcgcatgtttagcggctgtgtaagcgctggcatccggcagcggcgtatgttcatgtaccgacgtaatgttgatgatgtgaccgccctgcccttgtttcaccatctggcgggccgcaatttgtgagcataaaaatgcaccatcgacatcaacggtaaaaatcttgcgccactcatcgaaagccatatcaagaaacggcgctttggtcattgcgcccgcattattcaccagcacatcaatacgccccagccgttgaatgagtttctccagcgcctgcgcaccttctggcagtttaccgagatccagctgcacgatctccgcacgtacgccgtggctaactacctcacgcgcggtatcttttgccccttcttcatctgagtgccaggtaatgccaatatcaaacccctgctgcgccagtaataacgcgcactctttgccgatccccgaatcggaggcggtaataatcgcaacctgtgccatcgagttctccacttaacgctgaataaacgttaagtatagaaggcgcatatcatcagcgtttgtaacccccgcccaacgcaccagtgagttgaatggaagcatccagccactgcccttgcaataacaggccattggcccgctcacgcagcgcggggattctggcttcgctgacgcgggaaccagcaatgatgcccgcgttaaagcgcgcctgcgcaagacctaccacacgcaaggcatcgcgctcaatttgcgcctgatgctggtttttctccgcaagtgtctgaacctgactggctgcccgcgccacgtcattcaccgcttcaaccaccgctttgttgtagctggcgatagacaagttgctttcggcttttgcgatatcgagattggcgttaagacgaccactatcgaaaatgggtagcgtcaggcctgccgtaacgcccatttgctgcgcggaatgacggaacagatcgcttaagtgcaacgcatcctgttgcaggaaggccatcaggttgatgtcaggataaaatgccgcttttgccgcatcaatggtgcttagcgatgactcaacgtaccagtgcgccgcctgcaaatctgcccgccgggccagtaaggagtaccccagttcatcaggaagctggcttgccactttcggcaacgcgaccggtttaagcttcaatgactttgtctggttatttgtaagtgcacttaaccgtgcctcaataattttcattttccccgcgacatcgttgagctgctgccgggttttgctggcattaatatcggtttccacaccttcaactgaagaagtaatcccgttctgatatagctggcgatcggtcgcgataatggtgttctgctctttttctatttgctgcaagaccgtgtttaacgccgcctgggtttgccactcccagtacaggcgggctacgctgccagccagcaattggcgggtttgctcgcgttccgccgcccgtgctttaaccgtacccaggcgggcagtaacctccgcccgattctttccccagatatcgagatgccagcccgccgttaagccaaaagttccgttggtgtaccacggaccggtcgtacctgcggccggatcgttcagagcaaacggccccattaagccttctgccgacattttttgccgctccatatccgcagaaaagtcgatctgcggaccatcctgagtagcaattgccttcgcctgggcttcagctagctgaatgcgctgttcagccacctgcatatccggtgcgttctgtagtgcattgttaattaaggaagtgagttgattatcgtgatactccagccaccattggctgtctggccaaccatttttcagcgccgtgggtaatgcggtgtcaacttgtgcagcgggcgtttgctggcttaatgcctggcgggtttcatgcataggcgcacacccggccagcatcagtaacagcggaaaacaggcgatggcgggataaaaggaatcacgattcatgggggaataatcaggtaagaaaaggtgcgcggagattaccgtgtgttgcgatatattttttagtttcgcgtggcaatacatcagtagcaataaaacgacatatccagaaaaatatagactaagtaaatgatatcttccgatttatcttaatcgtttatggataacggcaaagggcttcgttttttcctatacttattcagcactcacaaataaaggaacgccaatgaaaattatactctgggctgtattgattattttcctgattgggctactggtggtgactggcgtatttaagatgatattttaaaattaattaatgtcatcaggtccgaaaataacgagaatatttcagtctctcatcctgttgcgctcctgtcatgtgcattgcttcatataatcactggcgcaaggagcgcgcagggggcggccaatcgccgccgccccctgcacccccgggctctggcgaacaaaatcgccgctgcgcggtgccctcggcttatcccttacggctaccgggtcgggcgcgaggtaacatccctgtaaaacgcgccctcagcccacatccatgtgggctgccccggccttcagggaacgcctcggcaattttgacgccaccaaacaaccgtgcggcctattgataaagagctaacacattgtcaaaaaacatcactatggttttttagagtttctcgatatcaattgcctgaatagcccttgcaatatcaggggaattattcaacacccgaacatgctgaaataatcccgttgcttcatcgtattctttacgcaaataactcaaccactgtttaatccgcgcaacgtgatataacccggtatcgccctgcttttccagacgggtatatttttgcagcaaagcaaccacctccggccacggcattcgcggttcgttatattttactacccggctcaggttgggaatattgagcgccccgcgaccaatcatcactgcgtcgcagccgctgatcgcaatgcattgttgcgcgctctgccagtcccagatttcgccgttggcaatcaccggaatattcagccgctggcgaatctcgccaatcgcctgccagtcaatatgctccgcgcggtaaccctgctcttttgtccgtccatgcaccaccagctccgtagcaccagcctgttgaaccgcatcggcgatttcaaatttcttctcaccgctgtcccagcccagacgcactttcacgctgacgggcaaatgcgccggtacagcttcacgcatcgcttttgcaccctgatagatgagttcaggatctttgagtaacgtcgccccaccaccgctaccgttgaccgttttcgacgggcagccgcaattgagatccacgccccaggaacctaattccaccgcacgggcggcgttctctgccagccattgtgggaactgacccaacaactgcacgcgcaccagcgtaccggatggtgtccggctggcgttttgtagctcagggcaaatgcgatgaaaaacttttaccggcagcagttgatccaccacgcggacaaactcggtgatgcacagatcgtagtcgttaacttcggtcagcaattcacgcaccagagagtcaagcactccctccatcggtgccagtaacacacgcatatcatcacccgcaaaataatgaggcgctatgttagcgcctatggtcagcggattaaaggtctacaaagagggattgctgcaaactgcaatccctctctatgcttgatgtatgcctgagttcgttgcgcattgcgtaatgccggggagcgaaaaaataagcgctgatttcttaatgtgatcggtagcacgttttacgaattaattgtatgatgaatccatctcatctggggtgttgattatgagtaagacactgaacattatctggcaatatttacgcgctttcgtcctgatttatgcctgcctgtatgcaggcattttcattgcttccctgctaccggtaaccattccgggcagcatcatcgggatgctgatcctgtttgtcctgctggccttgcaaattcttccggcgaaatgggtcaatccggggtgctacgtactgattcgctatatggcgctattgtttgtgccgattggcgtaggcgtcatgcaatattttgatttgctccgcgcgcagtttggcccggtagtggtttcctgtgctgtcagtacgctggtggtttttctggtggtgagctggagttcacaactggtacacggtgaacgtaaagtcgtaggtcagaaaggatcagaagaatgatggcgaatatctggtggtcattaccgctgacgttgattgtcttttttgccgcccgcaaactggcggcacggtataagtttcccctgcttaacccgttgctggtagcaatggtggtgatcattccttttttaatgctgaccggcatctcttacgacagctactttaaaggtagcgaagtgctaaacgatctgctgcaaccggcggtcgtcgcgctggcctatcctttatatgagcagctacaccagatccgcgcgcgctggaaatcgatcatcaccatctgttttatcggcagcgtggttgcgatggtgacggggacttccgtggcattgttgatgggcgcttcaccggaaatcgccgcgtcaatcctgccgaaatcagtcaccacgcctattgcaatggcggttggcggcagtattggcggtattccggcaatcagcgcagtttgcgtgattttcgtcggcatcctcggcgcggtatttggccatacattgcttaatgcgatgcgtattcgtaccaaagctgcgcgcggtctggcaatggggactgcctcgcacgccctcggtacggcgcgctgcgccgagctggattatcaggaaggtgcatttagttcgctagcgctggtgttatgcgggataattacttcgctgatcgcaccgttccttttcccgattattctggcagtaatgggctaaaatttgcgatgcgtcgcgcatttttgatgtaagtttcacgcgttgcataattaatgagattcagatcacatataaagccataacgggttcgtaaactgttatcccattacatgattatgaggcaacgccatgcatccacgttttcaaaccgcttttgcccaacttgcggataacttgcaatctgcactggaacctattctggcagacaagtacttccccgctttgttgaccggggagcaagtctcatcgctgaagagcgcaacggggctggacgaagacgcgctggcattcgcactacttccgctggcggcggcctgtgcgcgtacgccattgtcgaattttaatgttggcgcaattgcgcgcggtgtgagcggaacctggtatttcggtgccaatatggaatttattggtgcgacaatgcagcaaaccgttcatgccgaacaaagcgcgatcagccacgcctggttgagtggtgaaaaagcgcttgcagccatcaccgttaactacacgccttgtggtcactgccgtcagtttatgaatgaactgaacagcggtctggatctgcgtattcatctgccgggccgcgaggcacacgcgctgcgtgactatctgccggatgcctttgggccgaaagatctggagattaaaacgctgctgatggacgagcaggatcacggctatgcgctgactggtgatgcgctttctcaggcggcgattgcagcggcaaaccgttcgcacatgccttacagtaagtcgccaagcggtgtcgcgctggaatgtaaagacggtcgtattttcagtggcagctacgctgaaaacgccgcattcaacccgactctgccaccgttgcagggagcgttaattctgttgaatctcaagggttatgattacccggatatccagcgcgcggttctggcagaaaaagccgatgcgccgttgattcagtgggatgccacctccgcaacgctgaaagctctcggctgtcacagtatcgaccgagtgcttctcgcttaagcctggtgccggatgcggcgtgaacgccttgtccggcttgccagccctctcctggtgtcgaaattcccggcaaacagtttgccgtttcttgcgcaaaaccagcgggtaaagtagcctgatggaaattttccttagatcgagtctcctgcatgttaaagcgcgtgttcctcagcctgttagtcctgatcggcttgctgctgttgactgtgctcggcctcgatcgctggatgagctggaaaaccgcgccttatatctacgacgaattgcaggatctcccctaccgccaggtcggtgtggtgctcggaacagcaaaatattatcgtactggcgtaattaatcagtattatcgctaccgcattcaaggagcgattaatgcctataacagcggtaaggtaaattatctattactgagcggcgataacgcattgcaaagttataatgagccgatgaccatgcgcaaagatttaatcgctgctggtgtcgacccatcagatattgttctcgattacgcaggctttcgtacgctggattccatcgtgcgtacacgcaaagttttcgatactaatgatttcattattatcacccaacgtttccactgtgagcgggcattatttattgcgctgcatatggggattcaggctcagtgttatgccgtaccgtcaccgaaagatatgctgtcagtacgtattcgcgaatttgccgcccgtttcggtgcgctggctgacctttatatttttaaacgtgaaccgcggtttttagggccgctggtccctattccggctatgcaccaggtgccggaagatgcgcaggggtatcccgccgtcacacccgaacagttacttgaattacaaaagaaacaaggaaagtagttatggatgtacagcagttttttgtcgttgccgtttttttccttattccgatattttgtttccgcgaagcatggaaaggctggcgcgcaggcgcgattgataaacgggttaaaaatgcaccggaaccggtgtatgtctggcgagcaaaaaatcccggactctttttcgcttatatggtggcatatatcggcttcggaattttatctatcggcatgattgtttatcttattttctatcgttaatattttctcttttctgttaattattgagaataattattacttcactcaataagctgcggatataacattctgaaccgcagctatttgtgaatcctttcacagtataaatttccccacgcgcatagccttaatatcagcacgcaatatttatactctaaataattcgagttgcaggaaggcgacaagtgagtgagtccccaggagcttacataagtaagtgactggggtgagcgaacgcagacgcagcacatgcaacttgaagtatgacgagtatatttagcgttcgccttaattactcatagcattaaggaagatcacatgccgcaacaaaattatctggatgaactcactccggcttttacgcctttactggcgattaaagaagcctctcgctgtttattatgtcatgacgctccctgtagtcaggcttgcccggcacagaccgatccggggaaatttattcgctcaatctactttcgtaattttaaaggcgctgccgagacaattcgcgaaaataatgccctcggtgccgtttgtgccagagtgtgcccgacggagaaattatgtcaaagcggttgtacccgtgccggtgttgatactcccattgatatcggtcgcttacagcgttttgttactgattttgaacaacaaactgggatggaaatttatcagcccggtactaaaacgctcggcaaagtcgcgattattggcgcaggtcctgccggattgcaggccagtgtaacactgacaaaccagggttatgacgtcacgatttatgagaaagaagcgcaccccggtggctggttgcgtaacggtattccgcaattccggttaccgcaatcagtgctggatgcagagatcgcccgtattgaaaaaatgggcgtgaccattaagtgcaacaacgaagtcggtaacacactcacccttgagcagctgaaagcagaaaaccgcgcggtactggtcaccgtggggttatcgagcggttccgggttatcgctgtttgagcatagcgacgttgagattgccgtggacttcctgcaacgtgcacgacaggcgcaaggcgatatcagcattccacaaagcgcattaattatcggcggcggtgatgttgcgatggacgtagccagcacgctgaaagttctcggctgtcaggcggtaacctgcgtagcgcgtgaagagttagatgagtttccggcaagcgaaaaagagtttgccagcgcccgggagctgggcgtttcgatcatcgatggattcacgccagtagccgtggaaggcaataaagtcacgtttaagcatgtacggttaccgggcgaactgacgatggcggcagataaaattattctcgccgtcggtcagcatgccagactggatgcctttgcggagttagagccgcagcgtaacaccatcaaaacacaaaattatcagacccgcgatccgcaagtctttgctgctggcgatattgttgagggtgacaaaaccgtggtctatgccgtgaaaaccgggaaagaagccgccgaggcgattcatcactatttagagggagcttgctcatgttaacgaaagatctttcgattactttttgcggcgtgaagtttcccaacccgttctgcctctcttcttcgcctgtaggcaactgctatgagatgtgtgccaaagcctacgacacaggttggggcggcgtggtgtttaaaacgatcggcttttttatcgccaacgaagtctcgccgcgttttgatcatctggtgaaagaagataccggttttatcggcttcaaaaatatggagcagattgctgaacatccgttggaagagaatctggccgccctgcgtcagctgaaggaagattacccggacaaagtattgatcgcttcgatcatgggggaaaatgagcagcaatgggaggagctggcgcgcctggtgcaagaagctggcgcggatatgatcgagtgtaacttctcctgtccgcaaatgacttctcatgcgatgggtagcgatgtcgggcaaagcccggagctggtagaaaaatattgtcgggcagtgaaacggggttccacgctgccaatgctggcgaagatgacgccgaatatcggtgatatgtgcgaagtggcgctggcggcgaagcgcggcggcgcagatggcattgcggcgattaacaccgttaaatccatcaccaatatcgatcttaatcagaaaatcggtatgccgatcgttaacggaaaatcgagtatttccggatattccggtaaagcggtaaaaccgatcgccctgcgcttcattcagcagatgcgcacccatccagaactgcgcgatttcccaatcagcggtatcggcggcattgaaacctgggaggatgcggctgagtttttattgctcggcgcagcaacgttacaggtgaccaccggcatcatgcagtacgggtatcggatagtggaagatatggcaagcgggttgtcgcattatctcgccgatcagggatttgattcgctgcaggagatggtaggtctggcgaataacaatattgtcccggcggaagatttagaccgcagttatattgtctatccccgtatcaatcttgataaatgtgttggctgtggacgctgttatatttcctgttacgacggcggtcaccaggcgatggaatggagcgagaaaacccgcacaccgcattgtaataccgagaaatgtgtgggttgtctgctttgtggtcacgtctgcccggtgggttgtattgagctcggggaagtgaagtttaagaaaggcgagaaagaacacccggtaacgttgtaaaaccagagacgcatccggcatttggcaccgattgccggatgcagcgcatccggcaatatccacaatcacatcacttcttacgcgcgtatttcagtgaatccagcgctacggcgaagataataatcgcccctttgatgatgtactgccagtatgggtttacgccgatatacgtcaggccatagttgatgacggtaaaaataattaccccggtcaccacgccaatcaccgtccccacaccgccgctgaacgatacaccgcctaccacgcacgccgcgatagcatccagctcatacataaagccgaggttgttggtggcagagccgatacgtccggcttctaacatcccgccaaaggcatagaacacgccagacaacgcgtagatcatcagcaggttcaggccgacgttgacaccagatacttttgccgcttccgggttaccgccaatggcaaaaatgttcttaccgaagcgggttttgttccacaacacccagacgaacgccaccgcaatcaacgcgtagaaggtgatgtaagagagacggaaactccccagcgcgacaaagccctgagcaaaggtagagaagccactgtcaaaaccagaaattggcgacgccccgacaaagtcgtaatagagcgagttgatgccatagacgatgatcatcgtgccgagcgtggtaatgaacggcgtcacgttgagataagcgataatcagaccgttgatcaaaccgatcaccgcaccaatggcacagacaatcagaataaccagcgcaatcggcatcgtcgccatttccgggaacactttgttggcgttatccatggactgcaataatgtcgcagccaccactgccgccagccctacctgacgaccagcagaaagatcggtcccctgggtgacaattaaccctgccacaccgagcgcgataataatacgcaccgatgactgggtgagaatattacttaagttcaacagacttaaaaatgttgggtcctggaaaataataatcgccagcaaaactaaaagaacgacgtaaataccgccctctttcaggtaagtaagaaaacttttcttatttaacgcactcatgggaagcccctaatcttaaaggtgcaaagacgcaagacgcagaatttcgttttgcgttgttgtttttgtatcgacaattccggaaacgagaccattgctcatgaccagaatacggtctgttatccctaacaactcaggcatttcagaggagataataataatccccttgcctttcttcgccagttcggcaattaactgataaatttcaaacttcgccccgacatcaataccgcgcgtcggttcatcgagcattaatatttctggttgcgttagtagccagcgaccaataatcaccttttgctgattaccaccggagagcgaaccaatttgcgtccgatgacccggcgtttttacccgcatcgaatcaatcacccactgggtatcgcttttcatccgcgagttatccagtaaaccaactttatttttgtagttgcgaatattggaaattaacgagttaaaaccgatatccagataggcataaattcccgttgagcggcgctcctcagttaccagagcaaatccgtggtttatggcttcattggcattatggttattgatctttttgccgtgcaacgtaatggtgccagccgatttctcgcgaataccaaataacgtctcaacaatatcggtacgtttcgcccccaccagcccggcaataccgaggatctcccctttatgcagatcaaacgagacatcgcgaatcgacggctggcgcagtgacgtcaggttacgcacctcgaggatgacttcgcccggcttgttttctttgtcagggaaacgctgattaagagaacgcccaaccatcatggcgatgatcttgtccatcgtcagtcctgccagcggttcggtggcgatccactgaccgtcgcgcaatacggtaacttcatcacataactggaagatttcttccattttatgcgagatataaacaataccgcagccgcgctcttttaatttacgaataatagtgaacagatgattgacctctttttcggttaacgaagaagtcggttcatccataatcacaattttcgcgttataggaaaacgctttggcgatttcgatcatctgcatttgcgaaacggataatgtgccgacgcgcgcacgcggatcgatatcaatatccagttcgtcaaaaatcgctttggtttcgcggtacattttgtcctgatcgacaaacatgcctttggtgggatatcgccccagccacatgttatccatcaccgaacgttgtaataccaggtttaactcctggtgtaccatcgaaataccattttccagtgcttctttggcagaatggaaatcgatctctttaccctggaataaaatggtgccggagtctttttgataaataccaaacaggcattttaataatgttgattttcctgcaccgttttcccccattaatgcatggatagaatgtggccggacttttaaattaacgttatcaagtgccttaacaccaggaaaggacttgttgataccgctcatttccaacaagtattccccggaggacggagtcgttgagctgaccatataattttaccttgttggccatacaataagggcgcagtaatagactgcgcccagtcagtcttatttcttgctgaattcagccaggttgtctttatctacgccaacataaggaacgcggaccactttgttgtcgattttccagttggtgccatcagccgcacctttgccatcggccaggtttttcgccagatcaaaggtcgctttcgcctggttgttagcatcgttcagtacggtgcccgccagtgcaccggatttcaccagcgccagcgcttctggcagcgcatcgacgccaaacaccggaatgctggacttgttgtgtgctttcagtgcttctaccgcgcccattgccatcgcatcgttgttggcgataaccacttcgattttgttggcgttcgggccagacagccaggcgtccatcttatctttcgcctgagcggtatcccacatagcggtatctaactgtaactgttcagttttaatgcctttgtcgttcagctctttaatcacgtaagtggtacgtgcttctgcatccggatggcccggttcacctttcagcaatacgaattgaatctgaccgtctttgttcagatcccaaccctgattcgccgcccagtgtttagcaatcaaatcgccttgaataatgccggactctttggagtcagtgccaacgtagtatgctttgtcgtagctatccagcgccttacgagacggttctttgttgaagaaaaccaccggcacgttttgcccacgcgctttctcaatcaccgtacccgcagctgccgggtcaaccaggttgattgccagtgccttcacccctttcgccagcaatacgtcgatctgatcgttctgcttggactggtcattctgagaatcattcatcagcagctgaacatctggcgcggctttcgcatcttgctcaatagccttgcgcactacagacataaagttatcgtcgtacttatagattgttacaccaatgcgagtatcagcagcgtgtgcagcggcaccgaataacatgctggccatcacagcagacagggttaacaccttcttattcatggtatctccggtttttcttatgcagggtagtgcttgagataaatgctcggcggggcagtagagttaatgaagtgttactgaatgccgaagctcactttttaaaattcgttcttccatgcccggtaacgctccagaaaacggctttaattgttgttatgacgctattacctcggtgaaagtgattattcactgttacatacgggttacaacgttaaaacggtgcaatcatagctatcacattgttaagatactgtgaaatcactcacagattgaaagcggttacatcgcctgatttgttgagttagtgatcgtcgccgcattctggcgtgttgcgacagaatggcgacgcactaacgtcggcataaaacagtggctggcacgaggatcaatattgcctgctgccccctgcaaggccagttcggtggctaatttagccattgaagcaatgggataacgcacggtcgttaattgcgggtcggtgtaacgggcgatgggaatatcatcgaaaccgatgattgagagatgtaacggaatcgcaatgccattatcttttaatgctgtcagtgcgccagcggccatattgtcgttataagcaaatatagcggtaagttgtagattgcgccccagcagttcaaccatcgccgcctcaccgcccggcatgtccggcgaaccagtgccaatccagctttccggcggaataatatcctgctctttcaacgcactcatccagcctgctttacgcatggcgtcatcttcaatgccgtggctggaagaaagataaccaatacgttgatgaccgttattcagcaacatgcgcgtcgccattcgggcaccgctgagattatccaggcaaacgcaacgatgggcgtaccccggcacaacgcggttgattaacaccataccgggaatgttatccataaattgcgccagttcatcgtcactcaatgcttttgagtgaacaatcaacgcattacaacgctggcgaattaacacctcaatggcgtgacgctctttttccgcttcatgatagctattgccgattagcacgtatttctgatgctgctgggcgaccagatccaccgcttttaccaacgcgccgaaaaacgcatcagaaacgtccatcaccaccacgccaatggtgtcgctaacctgagttgccagcgcctgggcattggcgtttggcctataatccagctcactcacggctttcattactgcttcacgcgtgtcggcactgaccagcgtgctgttattgagcacccgggaaaccgttgccacagagacgccagcctgacgcgctacatcacgaatggtgatcatattcactacctgttatgagattgcagtaaatgactgcttgctggcggctattttgtcagcactgaatacaggacttcgtgaatcgagtcacagcaatggaaacggttacagccgttttgttaacgaatgtgatccagaacgttatcttgatgttttagatattgccgttccggcagcacgcaaagttaactgacgccagagccattccaccggcccctggcggaagtaacgcagccagataacagagaagaggatattcgccagccataccggaataacaaacgccagcagctccaggcgatcaaaatgcataaacaaaccgaggtggtaaaaaagcgtggtacaaatcagcgtttgcaatagatagttggtcagcgccatccgtccgacgcaggcgattgccagcaccagcttaaagcggcttaattgcggccagaagccataaaacagcgacgcatagccaatcgcctgaaacggcgcactcagttcccgcggcatttgaagtaagaaggcacaccagcgatacgcccagtccagctgccattgcagggcgatggcaggaaggttaatggtcaccccaatcgccaccagcacaaaaccagtacgacgatagtgacgtaagctgaactgccctttcagccagccgctgcgcatcagcgccgcaccaatgagcatcatcccagccagttgccagccatactgtgcgcccagtgccagtaaactgttgccaacaccatcggcacgattactgatcgcatcaacgccgccgtgaagcttccagtatttttcatacaaaatagccgatgcatccggcgtccaggcgcggctggtctggctgtcggaaatcagccccaataacagcaaaacgccaagccccaccagataaagcatgacgccggtattaaacaggctttttaccgatggcgcatcgcgcaccagccgccagcagattaagcccaccagcccgtaagccagcagaatatcgccgtcccagaacaataaaccgtgaataaagcccaataagactaacagcgttaaccgcgactggatccagcgtctgccacggggcagcaacatttgcagtccagcaccaaacagcagcgcaaaaagcgtgaggaatttcacctggccgatgagatcaagaaatgcccaggtccatgcatcctgcggcgtaatagcaccgtaccaggcgggattgagataagccgcctttggtagcccaaaggcgctgatgtttaatagcaggatccccagaatggcgacgccgcgaacaaaatcgagcgtgacgttgcgctccatggttcctgccttttaatcagttgtgatgacgcacagcgcgcagaaactcgtggcgcgtattctgactggatttgaacaatccaccaagagaggtcgttgttgtggcactggttgcatcgcggatgccacgcgccttcacgcagtaatgcaccgcgtcgatcgagacagccacgttattggtgcccagcagcgtttgtagcgcaataagaatttgctgcgtcagacgttcctgcacctgcggacgctgggcaaagaactgcacgatacggttaatttttgacagaccgatcaccgaatctttcgggatataagccaccgtcgctttgccatcgatggtaacaaaatggtgttcacaggtactggtcagagtgatatcgcgcacggtgaccatttcatcgaccttcattttgttttcaatgagggtgattttcgggaagttggcgtaatccagaccggagaaaatttcatcgacatacattttagcgatgcgatgcggcgtttccatcaaactgtcatcagccaggtcgagattcagcagctgcatgatttcggtcatatgaccagcaataaggcttttgcgcgtttcgttatccatttcatgcacgggcgggcgcagcggtgtttccagtcctcgcgcaactaacgcttcatgaaccagggccgcttctttactgagtgatggcatttatgatttctcctgcaggtgtgacgcctccgccctgcgtgggggcaaagttattaagctgatttacagcctgattattgtgcgtgaggcggcgcacataatccagtattcacagcgataattattgtaattgccgctgcctttcatcagcagatgttaaaacatcgttatgcaaatacggaagtgaaagttactcacagcacattgaataaacggtatgatgaagaaattgcaaacaacacaacaaggagccacgcatggaaatgctcgaagagcaccgctgttttgaaggctggcagcaacgctggcgacacgactccagtaccttaaactgcccgatgacgttcagtatctttctcccaccccctcgtgatcacaccccgccaccagtgctgtactggctttccggattaacctgcaatgacgagaacttcaccaccaaggcgggtgcccagcgcgtggcggcagaactggggattgtactggtgatgccagacaccagcccgcgcggcgaaaaggttgccaacgacgatggctacgatttaggccagggcgcaggcttttatcttaatgccacgcaaccgccgtgggcgacgcattaccggatgtatgattatctgcgcgatgaattaccggcgctggttcagtcgcaatttaatgtcagcgaccgctgcgccattagcggtcactcaatgggtggtcacggtgcgctgattatggcgctgaaaaatccgggtaaatacaccagcgtttcggcctttgcgccaattgtgaatccgtgcagcgtcccgtggggaatcaaagcgtttagcagctatttaggtgaggacaaaaatgcatggctggaatgggacagttgcgcgctgatgtatgccagtaacgcgcaggatgcgatcccgacgcttatcgatcagggcgataatgatcagtttcttgccgaccagttgcaacctgcggtactggcagaagccgcgcgccagaaagcgtggccgatgacgctgcgtattcagccgggatatgatcacagttactacttcatcgcctcttttatagaggatcacctgcgcttccatgcgcagtatttactgaagtgaaagtccgcccggttcgccgggcatcttctcatcagaagcgataatccactgccataaagtaacgacgtccgtcttcgttatagctgtagtcgtcacgactgagatccttgtcgccaaggttcagcacgcctgcgcgcagtttgacgtctttagtcacctgccaggccgcgccggtattccagatggtataaccgcccggtgttttagccgtcgcgctgtcggcgcgtttctgcccggtatagtgaccagaaacatagaatgaccagtcttccagcgccagcggtttccagtccagcgtaccgttagcagtatggaacggcagatcggatagcggtttgttttcgccgttgctgacatcacgaccatcgttgtaggtgtagttgatcgacagtttccattcatcgttgaacggaattttcagttcggtttccacgccctgaatacgagctttgttaacgttgtagtagctaaataccggtatgcgccgtccgttagcgcccgtctcaaaaccaacaaagttttggtagcccggtgcagcgttgacgtcagacgtacggctgatgctgatacgatctttcacatcgttacggaaaacggtaacgctggattcaaccccttccagccagccttcttcacccatgtagtaaagccccagctcccaactttcgctggtttctggtttcagatccgggctacccacaatcttacatgcgccacggcaggaattgctcgtccagtcagggctaagttgcaacagagaaggtgctttaaatgccgtcgcccagccccctttcaccgttacggtgtcggtggcgttataaaccaggtaggcacgcggactccagtgttcaccgtaggtttcgtgatcgtccatacgcacgccggtcgtcagcgccagcggctcgaagatccgccattcatcttccacaaacagcgcgtactggctggcagacgttttggagctggttcccccggtcaggttcaccgcatcgctaagtttgtcgtgacgccattcaccgccaaccgtgagaaactgattaatcgccgtcagcggcaacgtgtatttgccgtcgaccgtattgctttcggaagttatcgggctgctgttgccagggtttttgttctcgactttctcaccgtagtatttcagttcgctggtgccgtaatcccaacgcccattatggctgacggagtagttctggcgttccaggcggtttttgtccagcgagtcggaatcacgatcctgacggtcgaaaccgtatccggcagtaaaatcgtgattttgattcggtgtccaggcaaattcgacattgccgtcgcggctggagaatccttcaatacgcggcgtttctccggtatcggtggtcgttgagttttgcgggtcatccttttcacgttttgccaggctgccgtaagctttcattcccagcacaccatcaattaatggtccactggtaaagaactgaccgttataggtatcaccgcgatcgcgatgttcctgaatggtggtatcgacggtaacggtacccgaccatttctgaccgatttttttggtgatgatattcactacaccgccgagcgcatcggagccgtatagcgacgacatcgggccacgaaccacttcaatacgttcgatggaatcgaccgggatccagttcagatcgaaatcattgtggcggaagacggcattgcgggagttaacgcgtttaccgtcgacgagaatcagggtgtagctgctgtccagaccacgaatactaacgcccttacggttatccccttcgttcgtcagttgtacgccaggcacttctttgaggacatccttcagattctgtaccggttttcgctgcaggtcttcctgggtaatgacgctgatactggcgggtgcatctttgaggttttgttcaacggaagatgcagtgacaaccatcgtttcgccatcatcatcgaccgctaacacaggccatgcacaagaaatagcggacaaacacagcccgacccgtacgaaagggttcaacctaaacattccatatctccatgaggtaactacgaaaataaaatgggttatcgctcacatcttcttcacgtccccttgcgtacggcagcatcgcggtggacttatttgtatgcaggtgatcatcccagaaagccggaacagcctctgatttgtcagccttttttgattgcggcgtaacgataatgcaaacgataacaattatcaatccaaatgttaaattttatatccgcatgatttgtcagggaaatggaattgaaaaagccctctcggttgagagggcttagcaaggaagggaggaaacttatttcttatcgttctgcgggaacttcatttcgctgtaacgtacgaagtgagttcctttaatcagcttgtagccgaaccaaataatcaggaacagcgggataccaatatacgttgccgctacgccgccccagtcaatggtatctttcaggaacgcttcgtagttctggcccaaagtgataatcagacacagaatgaatgcgaagatcggccccagtgggaagaaacctgaacggtacggcagatcgttaatgtcgtgtccctgcaatacgtaaccgcgacggaagcgatagtggctaatggcaatccccagccaggcgataaaacccgtcatcccggaggtgttcagcagccacaggtataccgtctggttgccaaacatggaggtcaggaagcacagaccggcaatcaccgtcgtcgcatacagcgcattacgcggcacgccaccacgcgacagtttagcgaaaatgcgcggcgctttaccgtcacacgccagggtgtacagcatacgagtagacgcatacataccggagttacccgctgacagcaccgccgtcagaataactgcgttcatcaccgccgccgcagagagcagacccgcgtgctggaacaccagggtgaacggactaacgctgatgtctttaacatcgttacgcagcaggctcggatcggtgtacggaataatcaggctgataatcaggatcgcgaacacatagaacaacaggattcgccagaacacctgacgtaccgcgcgtggaatgtttttcgccggatcttcggactcgcctgcagcaataccgatcagctcggttccctggaaagagaagccgacaatcatagctacgccgatcatcgccgcaaaaccaccagcaaacggcgcttcgccgattgtccagttgctccagcccgcaggctgcgcgcctttgaagataccgataatcatcagcacgccaacgatgataaagacaataactgtcgtgactttgatcagtgagaaccagtattccgcttcaccaaagccacgaactgagatgtagttcagcaggaagataacgccgaggaacaacgcactccagatccagcccggtgtatccgggaaccaccagctcatgaccagctgagctgcaaccaggtcaacggcgatagtcaccgcccagttgtaccagtagttccagcccagcgcgaagccaaagccttcttcaacatagttctgaccgtaagtggcaaacgaaccggaaaccggcatatatgcagccagttcaccgagactggtcatcaggaagtaaaccatcaggccaatcagcatatacgagagcaatgccccgcccggacctgcctgagaaatcgttgcgccagaggcaacaaaaagacctgtaccgatggaaccgccaatggcaatcatcgtcaggtgacgcgcctttaattcacggcgtaagcccggcgcttctgtggttttagtttcggaaaccatacaaaaatgctatccatcttaaaaatgaggcgcgattgtagcagacgattggcaatccttccggcagaaatacacggttataagacaccttcatgatcgcccagggattataagtaaagcagccaatctcttttctggcgaatgcatgctgagggcgctgcgtcacgaaatcgacacagcaccagcatgttcttgtacagcaacttaacgcggtacattcgcgggatcgcaatagtccagaaagcgccgtagcgcgttggaaaggtgtttttgccgatgatgtatacgccacaacgtacgcatcaggcgcggcagagggaccgcaacttcacttaatgtgcctgcctgcaattgatcttcaatcacccgtcgcgacaggcaactaattcccaacccatgacgcaccgcatgtttgattgcctcggagttacctaattccatcgccatctcaaacttcggtaaatgtgacagcaatagataatcgacaatctcccgcgtgccggaaccgcgttcacgcaggatccacggcgcagcggccagctgctctaaggtgaccggaccacgggccaacggcgaagtcggcgcggcgaaaaccaccagctcgtcttccagccacggttcagaaataatttcagtgctgtggcacggtccttcaataaaaccaatatcaacgcggaaatccagcaccgcttgcatcacgtcctggctgttcccaacgctaagttcaatcggcaactgcggataatcatggcgataacgggcgataactgcaggcagaatgtagttaccgatggtactactggcatagatacgaatcgcgccgttgtcttcgcgaaacagttgttcgatttcaaccgcctgttcaagcaatgccaacgcacgcggatagagcagccgcccgtgttcattaacaaccagtcttttccccacgcgatcaaacagttgcacgccaagctgcccttccaggtcggtcaaggctgcgctcactgctgattgcgacaacgccagcatcaccgacgcctgggtggttgatccacttttcaatacttctgcaaaaacttccaactgccggagggtgatgtgcatagtcgcttaccacttataaagattaattataaatatataatcaattttatttttaaaccagttagtcgtaaccttatgcccggttaaaggagagggttatgacgaatatcaccttacagaaacaacatcgtacactgtggcattttattccggggttagccctgagtgcagttatcaccggggtcgccctgtggggtggttccattcccgcggttgcgggtgccgggtttagtgccctcaccctcgcaatcttgttggggatggttttaggcaacaccatctatccgcacatctggaaaagctgtgacggtggtgtgctgtttgccaagcaatatttattacgtctgggtatcattctttatggcttccgtctgacgttctcgcaaattgccgatgtcggtatcagtgggatcatcattgacgtgttgacgctgtccagtaccttcctgctggcttgcttcctggggcagaaagtgtttggtctggataagcacaccagctggttgatcggtgccggtagcagtatctgtggtgctgccgcggtactggcgactgagccggtagtgaaagcggaagccagtaaagtaaccgtggctgttgcaaccgttgttatcttcgggaccgtcgcgattttcctctacccggcgatatatccgctgatgtctcaatggtttagtccggaaactttcggtatctacattggttctactgtgcacgaagtggcgcaggtggtggcggcaggtcatgccatcagcccggatgcggaaaacgcagcagttatttccaaaatgctgcgcgtgatgatgctggctccgttcctcatcctgctggcggcgcgtgttaaacagctgtctggggcgaacagcggcgagaaaagcaaaatcactattccgtggtttgccatcttgttcatcgtcgttgccatctttaactcgttccacctgttaccgcagagcgtggtgaacatgctggtaacgctggataccttcctgctggcaatggcgatggcggcgctgggtctgaccactcacgtcagcgcgctgaaaaaagccggggcgaaacctctgctgatggcactggtactgtttgcctggctgattgttggtggtggtgcgattaactatgtgattcaaagcgtcatcgcataaaccactacatcttgctcctgttaacccgctatcattaccgttttcctccagcgggtttaacaggagtcctcgcatgaaatacattggagcgcacgttagtgctgctggcggtctggcaaatgccgcaattcgcgccgccgaaatcgacgcaaccgcgtttgccttgttcaccaaaaaccaacgtcagtggcgtgccgcaccgctcacgacgcaaaccatcgatgaattcaaagcggcctgtgaaaaatatcactacacatcggcgcaaattcttccccacgacagctatctgattaacctcggacatccggtcactgaagctctggaaaaatcgcgcgatgcctttatagatgaaatgcagcgttgcgaacaactggggctttctttgctcaacttccaccctggcagccatctgatgcagatttcagaagaggattgccttgcgcgtattgccgaatccatcaacattgcgctggataaaactcaaggtgtaacagcggtgattgaaaacaccgccggtcagggcagtaacttagggtttaaattcgaacatctcgcggcgattatcgacggcgtggaagataaatcccgtgtcggcgtctgcattgatacctgccatgctttcgctgccgggtatgatttgcgtactccagccgaatgcgagaaaacgttcgcggattttgcccgtattgttggctttaagtatctgcgcgggatgcaccttaacgatgcgaaaagtacctttggcagccgcgttgaccgccatcatagcctcggtgaaggcaatatcggtcatgatgcgttccgctggatcatgcaggacgaccgtttcgacggcattccgctgatccttgaaaccatcaacccggatatctgggcagaagagatcgcctggctgaaagcgcaacaaactgaaaaagcggtggcctgatcgatgaacgacagggaaaagcagattcttaaaattttacggcgtaacccgctgattcaacagaatgaaatcgccgatattctgcaaatcagccgctcacgtgttgccgctcatattatggatttgatgcgcaagggtttgattaaaggcaaaggatatatccttaccgagcaggattactgtgtggttgtgggtgcaatcaatatggatattcgcggaatggcggatatccgttacccgcaagcagcctctcatccaggttctgttcactgttccgcaggcggcgtcggacgtaatatcgcgcataacctggctctgcttggtcgggatgtgcatttaatatcagctattggcaacgatttttacggcgagacattactggaagaaacgcgccgcgcgggcgtgaacgtttcaaactgcattcgtctgcatggacacagcactgcaacttatctcgctatcgctaataagcaggaagaaactatcctggcaatcaatgacacacatattctgcaacagctaacgcctcaactgctcaatacttcacgggacttgattcgccatgctggtgtggtgctggctgattgtaatctcacacctgaagccctggagtgggtctttaccattgctgatgaaattccgatgtttgtcgataccgtttccgaatttaaagcgaacaaagtaaaaaactggtacagccggatccacactctgaaaccaacacaaaatgaactggaaattttgtgggggcaaccgattaaagacgacaacgatcgcatcagagctgtaaattcgctgcatcaacaaggtgttaaacgcatttttgtttatctgaaagatgaatctgtattttgcagcgataaggatggagaacaatttttgctgaccgcgccagcgcatacgacagtagacagttttggtgctgacgatggttttatggcgggcctggtatatagctttcttgaaggatacagtttccgcgacagcgcccgttttgcggtagcctgcgcggcaatttcgcgcgccagcggcagcttaaacaaccctaccctgtctgccgataacgcgctttcattagtgccaatggtgtaacaatgttgccggattcgacgcttgaccgcatcttatccggctcataaattgagcactacgctaaaccaataaagaatcctgcaatagtagcactcatcaggttagaaagtgtcgccgccgccagcgcgcgtaaaccaagttgggcgatttccggcgcacggtgtggcgcaaccgcagaaaacgcctccaccaccaccccgatagaaccaaagttagcgaaaccgcacaacgcgaaagaaataatcgccacggttttagcatccagagtgccacccgtttgcagatatggcgagaaattgagataagcgacaaattcattgatcgccagcttctgcccaatcaaactcccggcaagatttgcatcactccagtcaacccccatcacccacgccaatggggccaacaggtaacctaaaatggactccagcgaggcatgtgcaaaaccaaaccagccgccaacgccgccgataataccattaattaacgcaatgatggcgacaaatgccataacaactgtcgctacaccggcggcgattttcagcccggtcattgcccctgtcgcagcggcttcaataatgctttttggcggtgtttcggtgaaagagaggttattaaaggaaacctgcgaagattccgtagccgggcttaacaggcgggcaaacaagatcccgccagggatcgccattaacgatgccgccagcaaatattccacaggtacgcccagggcggcgtaaccaatcattgtcgaaccagcaatcgaggccatgccactacaaatcgctgtaaataattcattgcgattcagacgatcgataaagggtttgacgatcgccggaatttcgttttgcccgaggaaaatggtggtgaccgcgacgaatgactcgatcttgctgatatttaacgctttctggaagataccgccgagaatgcgaattaaaatccccatcacaccgatgtagtagagaatactcaccagtgctgtaacgaagataattgccggtaatactctgaaaccaaagataaatcctgcgccatcaaacagcgtgtccattttcggcccgaccagcgaaccgaagataaatgcgctacccgcgtcgctgtacgccatcactttatgcacgccaaaagcgactttttcagcgacccaacgccctggcggtaaccaaagcataatgccgccaatcacaacctgtaacactaacgccgcgccaacggtacgcaggctgatcttcttcttgtttactgacagcaaaaatgcaattgccagcaataccaccattcccagaacacttctcatgacatccatagtgattatctcttcatgtcatattgggcgacggctttctgcccatcagaaatagccgggcctgcatcttgcgctatcggcccggcttgttatcaacgcttaatgggttttgatgtagccgcgcacgcactcttcgactaagccccagaaccagtcggtatcaatagtgatgccgactttggtattggcgggcttgccaagaacgcccagctcgtcgcagacggtgcgcccatagcaagggccactgttgacgtccacttcgacgtacatctcctgggttttaatgccatcagggttaatcagataaccgatgcaggtggcgtcgtgcaccgggccgccagccaggccgtagttttcgaactgcgttttgagagtgaagttcatgatgtcgctgaacagctctccggcagggccgcctgccctttccatccgagcaatcacgtccggggtgcaaacggtctggttggtgagatcgaggcccatcatcactaatggaacgccagaggtgaacaccacgcgggctgcttccgggtcagcaaagatgttgaactcggcagatggcgtgaagttgcctgtaccgtaagcgccgcccattagcacaatttcacggattttgggcaggatcgcgggttgcatacgcattgccaccgcgatatttgaaagcggaccaaccggcaccagagtgatatcgccatcgcttgccatcagggtatcaatgatgtatttcaccgcgtgggtactttctgcctggcgggtcagcggctcgaataccgggccatccagtccggtttcaccgtgaatattatcggcaacgatttgttgacgcataatgggttgcggcatccccgcataaaccggaacattaatctccagtttctggcaaacattcaggccattaattaatgttttatcaagcgtctgattacccgctacaatagtgatgcctaataaatctattgccggatgtttcgctgccatcatcattgcaatagcatcatcatgacccggatcacaatccagaataatttttctcttttccattgtttatttcctctgtttccagttgcgttattttttctacagcaaagaaaattcgaccgggccgatgattgaatcttaccaaccgcgtacgtatgctaaatatgagaaatctcatagcggataaacatcgtgaaagaaatccacaataatgatcttaagcagcaattgatgagtgaatccgcgtttaaggattgctttttaacggatgtttcagccgatacgcggctgtttcattttttagcgcgtgactacattgtgcaggaagggcaacagccgtcctggctgttttacctgacgcgaggccgcgccaggctttacgccacgctagctaatggtcgcgtgtcgctgatcgatttctttgccgccccctgttttattggcgagattgagttaatcgacaaagaccatgaaccgcgtgcggtgcaggctattgaagagtgttggtgccttgcgctccctatgaaacattaccgcccgcggttattaaacgacacgctatttttacgaaaactctgcgtcaccttaagtcataaaaattatcgtaatattgtttctttaactcagaatcaatcatttccgttagtgaatcgcctggcagcatttatattactctcgcaggaaggtgatctttatcacgaaaagcatacgcaagcggcagagtatttaggcgtttcttatcgacatcttttatatgttctcgcgcaattcattcacgacggtttattaattaaaagcaagaaagggtatctaattaaaaacagaaagcagttgtcaggactggcgctggagatggacccggagaataaattctccgggatgatgcagtaaaaattatttgcaatagcgcgattgccggatgcaacacttaataagcgcgtacatccggcaatgaaactcaagctaaaccaataaagaacccggcaatggtcgcactcatcaggttggaaagcgttgctgctgccagcgcccgtaaaccaagctgggcgatttccggcgcgcgttttggcgaaatagccgaaaatgcgccaacgacaacaccgatagaaccaaagttagcaaaaccacaaagcgcaaaggagataatcgcaatggttttcacttccagcgtgccgcccgtttgcaggtatggggagaaactcaggtaagcgacgaattcgttaatcgccagtttctgcccaatcaggctacccacaagattggcatcactccagtccacacccatgatccacgccagcggtgccagcacatagccaaaaatactttccagagaggcattggcgaaaccaaaccagccaccaattccgccgataatgccgttgatcagcgcaataattgcgacaaacgccattaccaccgtcgctacaccagcggcgattttcagcccggtcatcgcaccgctcgccgccgcttcgataaagctttttggcggcgtttcgctgaacgacagattttcaaatgtgacctgtgaaggctcggtggccgggctaagaatacgtgcaaacaaaataccacctgggatcgccatcagcgatgccgctaacaggtagtcaattggtacgcccattccggcataaccaatcatcatcgaaccagcaatggacgccatcccgctacaaattgcggtaaacaactcgttgcgattcatgcgatcgataaacggtttaacgatcgccgggatctcattttgcccgaggaaaatagttgtgactgcgacaaaagattcgattttgctgatgttaagagctttctggaaaatgctgccaaggatgcgaatcagcagccccatcacgccaatgtagtacagcagactgatgagcgcagtaacgaaaataatcgccggaagtacgcgaaaggcgaagataaaacccgcaccgtcaaacaagacatccattttcggcccaaccagcgaaccaaaaatgaaggcgctaccggcatcactgtaagacatcactttatgaacgcctaatgccgcctgttctactgcccactttcccggtgggaagtagagcatgatgccaccaatagcgatttgcagcagcagtgcggctccaaccgtgcgcaaactgatgctcttttattcactgacaacagaaatgctattgccagtaacaccaccatccccacaacacttctcattatatccataatgattttcccttcatgccagtaaacccggcgtcagcgccaggttttggtatgcttgatgagtacgggcgacggctttctgcccgtcagaaattaacccgcgagacgctggtattctttggcaatttcactcgccagaatggcgttgttgaacaccagctggatattggatttcaggctgtcaccgccggtcagctcagcaacgcgcgccagcaggaacggtgtactttctttaccaataacgccctgctcttcggcttcggcgacggcttgatctatggctgcattgatagattcctccggcatcgcaaactgttccgggatcgggttcgctaccacgaggccaccgttcagcccgctttgccatttcaccgccattgcacgggcaatttcactggcgctgtcgagacgaatgctgacgtcaaacgagctggtacggcagaaaaacgcaggcagcgctttagtctgatagccaattaacggcacaccgaaggtttctaaatactcagtggttaatcctaaatcgagaatagatttcgccccggcacaaacaacggtgacattagtatttgccagttcttgcaaatcggcagaaatatcgaaggtatgttccgccccgcgatgcacaccaccaattcccccggtggcaaatactttaattccggcaagcgccgcaataatcatcgttgaagccacagtggttgcgccattttttccggcggcaacaacaaaaggtaaatcgcgacgactaactttggtcacgttatgcccttcacgacccagtaattcaatttcttctttgcttaaacccactttcatcacgccgccaataatggcgatagtggcaggtactgcgccctgtttacgaatagtttcttctacttcaattgcggtctgggcattttgtgggaacggcatcccgtgagaaataatggtcgattccagcgccacaaccggttttttgttttttaaagcgtcctgcacttccggggaaatttgtaataattcaggggaaatttttaattcagacattctgcgttctccactaacgatataacgttggcaatcgataaatcggggttattggtgtattcacaggagagcgccattgacgaacatccctgtgcgaaacgaacagattcggcaaacggcattccgtctacccaacacgaagcaagtcccgccatcatggcatcgcccgctccggtaacattaataacattggttttgatcggcgcagaccagccattttcaccgctgatatcgctgtaataaacgccgtcgccgcccatgctcaataccagtcggttcaggccatgttgatggaaccaggcagcaacttttgccacatcgtcacgccctgacagcgcaatcccactcagggtttccgcttcaaggcggtttggcttgagagtgtggatctgatttagacggtcgcgcactttgacacatttccacgctgaaaccggatcgacaaatacgggtacgttggcggcattatccagaatccatgccagtgcctcttcactgatattacagtctgcgacaatgacctttgccctctgaataaattcacggtgctgtgcgagatattcagctgtaatagcgttgctaatattcatgtcatttatagcaaccagcatttcaccggtattatcgagtaatgataaatagcttgacgtattttctcctggcacaatcaggcatttatcgacataaacgccagattgattggtttgcgttagcagcgattgaccataaaagtcactgcctacggcgctcagtagccaggctttgttccccagcaacgccaggttttgtgcaatattgcgcccgactccaccaggcgtaaattttattttacctggatttgaatccgcataatttaatgattcatgtgaatatccggcgacatcaatattcgccgaacctataattacgacataatccttttcgcgcatagcacgtcctctggtaaaaaattaccaaccctgtcaatccacaagaatatagatactgcaaagacggtttaaacatgtgttcatatttaaacatgtgctcatagtatgcatgttttacgtaaagtaaattaccgccagagaggcaaaatgggcagatttgagcaggctcacaaaatgcgattaaatgcctgaattacaaaagcgaggaatttgtgacgggatgcacagaacaggaacactaaaaaagggcagaaaataatctgcccttgaggaaataaccttagtgtttgatgaacgtttcaggtttctactgaaagataaaaccatttaaattcataaaattacatttacaaaccggtcattccctttgcgctcatccaatgatacagggcaggaaatttctgccctgtaacacaccttttattacgctgctttcgctactgcgtccacttccggacgtttcaggaaggcataggccaaacccgccaccagcgtaccggcaataattgctaccaggtaacccagtaccggcgtaatagcgccagggatcagcagaacaaacagaccaccgtgtggtgccatcagtttcgcaccaatcgccattgagattgcgccagtcagcgcaccacccacgatacagcacggcagcacacgcatcggatcacgagcagcaaacggaattgcaccttccgaaatgaagcacagtcccaataccagagcggctttgccaccttcctgctgcgctttgtcgaatttgcgacgcgccaccattgttgccagacccattgccagcggtggcaccatacctgccgccataatcgccgccatcgggccataggtttgagtactcagcagacccacaccgaatgcgtacgctgctttgtttaccggaccgcccatgtcagtacacatcatgccaccgaggatcgcccccagcagaaccgcattcgcagtccccatggtctgcagccagtgagtcaacccttcgagaatgccagcaactggtttaccgatcaggtagatcatcgccagaccgaccaccagactggaaattagcggaatgatcaggatcggtttcagcgcctccatactctgtggcagtttcaattgcgtactgattaacttcgcaatgtaaccagccaggaagcccgcaataataccaccaatgaagccagaaccggtgctgaccgccagcataccgccaatcagacccggcgtgaggcccggacgatcggcaatggaaaaggcaatataacctgccagtaccggcaccatcagcgcaaaggctgaaccaccaccaatctgcatcagcgccgctgccaacgtacccggctctttaaacgcttcgataccaaaagcaaaagaaagcgcgatacacagaccaccagcaacgaccatcggcagcatgtaagagacgcccgttagcaagtgacgataagcgcctgcactctctttcttaccttcagtggtcgccgtttgagttttgcccgccggttcatacggcgttgcttcagcaaccgctttatccagttcctgcgcggttttcttcagcgccagaccggtagaggtacgatacatcggtttaccagcaaatttcgccagatccacttcgatatctgccgccacaatcaccagatccgctgcggctacttcctcgggagtgattgcattacccgcgccaacagaaccacgggtttcaactttcacccaccagccacgttttttcgcttcggtttcaatggcttcagccgccataaaggtgtgtgctacgccagtcgggcaagcagtcaccgcaactacgcgtttcggaccgctggcggcaaccggtgctgtcgcagtgaccggcgcagtgtaaggtttcgcatggcctttggcttcactcaggaacagctcagggtgcgcaactgcccgggaaatatcacccagccagacatttttaccgttcagcgcgctgtcattcgggatggaatcaccgagaacaatcgccatttctgcgtcgttcggattgtcgatgatttccagttttgcttttcgcgccgccgcgcccagcagggtcttcgccatataggcgcgtgcctgaccgagattagcgtcaataatcagcagcgttttcattatgcctctcctgctgtcagttaaaaggttgtaagtcgacgcgcgccatcattgcggccaactgcggacgatcggtaatacccacattgctttgacttaccgccagggcggcaacagctgtcgccagacgcagtgtgtgttcactggattcacgcatcagcaagccataaatcaggccaccaaccatagaatcccctgcgccaacggtgcttacgacatcgactgacggtggtttggcgatccattcgccggaggcattaacccaaagcgcgccttcggcacccagtgaaataacaacatgcgcaataccttgttcacgtagcgcatgtgcagcttcaatcacatctttcatttcaggcagtttacggcctgcccagatttccaactcgcggcggttaggtttcaccagccacgggtgccgctttcaaacctgctactaacgcttcacggctactatcaaagataatgcaaggacactgactacgcaggcgagtcatccagtcggtgaacgcttccgggctgacgcctgacggtaagcttccgctgacacagaccatatcgaactgaccgagccagctcagagaatcagtcacaaagcgttcccagtcggcgggggtgacttcaaaacccgagaagttgaagtcggtcacttcgccgtctttttccgtcagcttaacgttaattcgggtgcgcccctgtacaacctggaaacggttggcaatgcccagctcgctgaacagttgttgaaaaccatcctgattgtctttacccaggaagccgccaacggtgacatcaattcccaggtcttttaatactttggccacgttgatgcctttacccgccgcatgcagaccggtggttttcaccaggttcacttcgccgcgttcaatttccgggcagaaaccaacaaggtcataagccggattaagggtgatagtagcaacacgtctgctcattatgcgccctccccaagaccagcagcgatagcgtcgccaatggctttcagcgcctgttcagcatctgcaccctgggcggtaaagcgtaggcgatgacctttcttaacgccaagtgccacaactttcatcagactacgtccgtttgccggtttgccggtaccatcaaggtttgtcacggtaatatcactgttaaattgtttaatggtattgaccagcatggtacctggacgagcatgcaggccgtgttcattgcgcaccacaaactccgcgcttaacacgtcgtcggtcggcgcatcatcgctggtcagcagcgccagcaacgttgccgcatctgctttcagcaagcggtcagctttattgtcgagcaataaatcagcgagacgcttaagaaccgcgatgggctgatcgtcattcatcgccacactcaccagcatggctgccgtttcgccgtccacatcaaaagcatttgccgcacggcttaccgcaatcgcgctacgcagattgccttcggcgctatcgctcagccagataccctgtccgaggttcagcggttgttcattgatggctttggtgacgaaagtggcgtcaactgccctcgcctctttcagacgcgcagcgttcagcgcctgaagagtcagcagatcgctggcggcgatatccagcgtcagcatttcgttgtcgagcttcagctgctcactctgcttttcgcccatcagcaatgcgcgaagttcttctgctgttgttgctgacttcagttgttcagcaacggaatcatcgctcagtacgcgggtcagctggcgtagcaggcccagatgttcatccgagctggcagcaataccgattgccacgtacgctacctgaccgtcaccccaggtgacgccttccgggaactgaaatacctgaacgccggttttcagcacctgatcgcgggtgtcggtagtgccgtgtggaatagcaataccattgccgaggaacgttgaggtttgctgttcgcgcgccagcatgccattgacgtagccttctgctacattaccggcctgcaccagcgccgcagcgacctggcgaatcgcctcttctttgtctccggccttttcgccggatggatgtcctgtacggataactggaacatagttctcctctcttgctgaattgaaacgattcagcctctatgagaaaaaaagcgccaacctggcttagggttaaagacaagatcgcgctgaaacgtttcaagaaagcataatacttctgtttcagcacgcaaggaaagccgtaaagttatgagcaaaagtttgatgtgctgcacaattttttgccatttttcctaattgctgatgggaaaatccgttatcagcaatttcatttcagcagcgtcagcagccaatcagcaacagtgaaatggcattttgattattcgtggcgcttttgatttcgctgtctgtttattttctgacaagcagcgtaaactccgcgtcttcctcttccagtgatcgaccagcatgcataactcccccgcagtctccagcgcgaaatcgtttgacctgacctcgacggcgtttttaatcgttgcctttctcaccggtattgcgggcgctctgcaaaccccgacactcagtatttttcttactgatgaagtacatgctcgtccggcgatggtgggattcttctttaccggcagcgctgtcattgggattctggtaagtcagtttctcgccgggcgctctgataagcgcggcgatcgcaaatcgctgattgtcttttgctgcctgttaggcgtgctggcctgcaccctttttgcctggaatcgcaactactttgttttgctattcgttggcgtctttcttagcagctttggctcgaccgctaacccgcaaatgtttgcccttgcccgtgaacatgccgacaaaaccggacgtgaggcggtgatgttcagctcttttttacgcgctcaggtttcactggcatgggtcattggcccaccgctggcttatgccttagcgatgggtttcagctttacggtaatgtatctgagcgcagcggtagcgtttattgtttgcggtgtgatggtgtggctgtttttaccgtcgatgcaaaaagagcttccgctggcgaccggcacgatcgaagcgccgcgccgtaaccgtcgcgatacgctgctgctgtttgtcatttgtacattgatgtggggctcgaacagcctgtacatcatcaacatgccgctatttattatcaacgaactgcatcttcccgagaaactggccggtgtgatgatggggaccgccgccgggctggaaatcccgacgatgttgattgccggatatttcgccaaacgtctgggtaagcgtttcttaatgcgcgttgctgccgtgggtggcgtctgtttttacgcaggaatgctgatggcgcattcacctgtcattctgttgggcttgcagctgctaaatgctatttttattggcattctgggcggcatcgggatgctctattttcaggatctgatgcccggtcaggcgggttcagccaccacgctctataccaacacgtcgcgcgtgggctggatcatcgcaggatcagtggcgggcatcgtcgccgagatctggaattatcacgctgtgttctggtttgcgatggtgatgattatcgccactctgttttgcttactgcggattaaagatgtttaaggcgcggtcagcatttccagatcgataagccaggtcatggcctgctgacgcgagttaccgcacatttcagcgctggcttgtaagcctgcacagactttcggtcgcagtggcgaggtgaaaattttacagcgttgctgttcatcaagctgaatgcagggcgtattggcgggcttgccatctggcataccgggaatagggctggaaattgaaggggcagtgcaacacgccccgcaacccggacggcatttcatacgttgttctcttaaggttaaccaccggattgatgagcgcgcacagtaccaccttttttgcaccagcaaaagtgcgaataccacttgcccgaaaggcccgtcgcgagtactttgtcgcgatatttttgacattttcgactacaggaatttttcgatgccaagagcgaacgaaattaaaaaaggtatggtactgaattacaacggcaaactgctgctggttaaggatattgatattcagtcgcccactgcccgcggtgccgctacgctgtacaaaatgcgtttttctgatgtccgtaccgggctgaaagtagaagagcgtttcaaaggtgatgatatcgttgacaccgtgacgctgacccgccgttacgttgacttctcctatgtcgatggcaacgaatatgtctttatggataaagaagactataccccgtataccttcaccaaagatcagattgaagaagagttgctgtttatgccagagggcggcatgccggacatgcaggtgctgacctgggacggtcaactgctggcgcttgagctgccgcagaccgttgatctggaaatcgttgaaaccgcaccaggcatcaaaggggcatctgccagcgcccgtaacaaaccggcgacattgagcactggtctggtgattcaggtaccagaatacttaagcccgggcgaaaaaattcgtatccatatcgaagaacgccgttatatggggcgtgctgactaacttcagccgcatgcagaaaagggatagctcaggctgtcccttttttaatttattataccaatattctattttgcgcttcctgaacaccttacgccctcaattttcactcgttgattgatcgccctcacacttcatcgcattaacaatccagaccaatttcaattgctgtcatataactttacactgtcattgttaatttatcgttactaagacgtgactcctatgaagacaattgcctccgttacgctcccgcatcatgtacacgctccacgctacgatcgccagcagttgcaatcacgtatcgttcattttggctttggcgcctttcactgcgctcatcaggcgttactgaccgatcgtgtgctgaatgcccagggcggcgactgggggatctgtgaaatcagcttgttcagcggtgatcaactgatgagccagctccgcgcacagaaccatttatataccgtgctggaaaaaggtgcggacggcaatcaggtgataattgtcggtgccgttcacgaatgccttaatgcaaaactggattccttagcggcaattattgagaaattttgcgagccacaggtggcaattgtttccctgacgattaccgaaaaaggctattgtattgacccggccaccggtgcactcgacaccagtaatccgcggattattcacgatctacaaacccctgaagaacctcactccgcaccgggtattctcgtcgaagcactgaaacgccgccgtgagcgcggccttacaccgtttaccgtgctctcctgcgacaatattcccgacaatggccatgtggtgaaaaacgcggtgctgggaatggcagaaaaacgttcgccagaactcgccgggtggataaaagaacacgtcagttttccgggaaccatggtcgaccgcattgttccggctgcaaccgacgaatcactggcagaaatcagccagcatctgggggtaaatgatccctgcgcgattagctgcgaaccgtttatccagtgggtggtggaagataacttcgtcgctgggcgtcctgcctgggaagtcgcaggtgtacaaatggtgaatgatgtcctgccatgggaagagatgaaactgcgtatgcttaatggcagccactcttttctcgcttatctgggttacctttcaggattcgcccatatcagtgattgcatgcaggatcgcgcatttcgccatgccgccagaacattaatgctgaatgagcaagcgccgacactacaaattaaagatgtcgatttaacacaatatgcggacaagttaattgcacgttttgctaatccggcgctgaaacataagacctggcaaatcgcaatggatggtagccagaaattaccgcaacgtatgctggcaggtattcgcatacatctggggtgcgaaacggactggtcgttgctggcattaggcgttgctggctggatgcgttacgtcagcggcgttgatgatgccggaaatgccattgatgttcgcgatccgcttagcgataaaattcgcgaacttgttgcgggcagcagcagtgaacaacgcgtaaccgccctgctttccctgcgtgaagttttcggtgatgatctgccagataacccgcattttgtgcaggccatcgaacaagcctggcaacaaatcgtacaattcggcgcacatcaggcgctattaaacaccctcaaaatttaacgatttctgcggttaaagcggatgaagctcaccttcgtccgctctccccttctcttttctgccttttttagccaggattaacgctcagttaacttaccagagtattgcggagccgttgtgaccaggaccaacctcatcaccggttttctcggcagcgggaaaaccacgtcgattcttcatctgttagcccataaagatcccaacgaaaaatgggcggtactggttaatgaatttggggaagtcggaattgatggtgctttgctcgccgatagcggcgcattgctgaaagagatccccggcggctgcatgtgctgcgttaatggtttacccatgcaggtagggttgaataccttactgcgtcagggaaaaccagaccgcttgttgatagagccgaccgggctgggccatccgaaacagatcctcgatctgttaaccgcaccagtctatgaaccgtggatagatctgcgcgccaccttgtgcattctcgatccgcgcttgctgctggacgaaaaaagcgccagcaatgaaaacttccgtgaccagctggctgccgcagacatcattgtcgccaataaatccgaccgtgcgacgcccgaaagtgagcaagcgctacagcgttggtggcagcaaaatggtggcgatcgacaattaattcacagtgagcatgggaaagttgacggtcatcttctggatttgccgcgtcgcaatttagccgagttgcccgccagcgccgcgcattctcatcagcatgtcgtgaaaaaagggttagcagcgttaagcctgccagagcatcaacgctggcgtcgcagtctgaacagcgggcaaggatatcaggcctgcggctggatattcgacgctgatacggtattcgacaccattggcattctggaatgggcgcgacttgcaccggtggaacgcgtcaaaggcgtgctgcgtattcccgaagggctggtacgaatcaaccgtcagggcgatgacctgcacattgaaacgcaaaacgttgcgccaccggacagtcgtattgagctgatttccagcagcgaagctgactggaatgctttgcagagcgcgctgttgaagcttcgtttagcgactaccgcgtaaggttgcctgcgtttttcagtaagataattagagaaaatatgattaaaaatttgccgcaaatagtgttgttgaatattgtcggcctcgcgctgtttctttcctggtatattcccgttaatcatggattctggttgccgattgatgcggatattttttatttctttaatcagaaactggtcgaaagtaaggcctttttgtggctggttgcattgaccaacaatcgcgccttcgacggttgttcactgctggcgatgggtatgttgatgctgagtttctggctgaaagaaaacgccccaggcagacgacgtatcgtgattattggtctggtcatgctattaactgcagtggtattaaaccagctgggtcaggcattaattcctgtaaaacgggccagcccaacattgacttttaccgacattaaccgcgtcagcgaactgctctctgttcccacgaaagatgcctcacgagatagctttcccggcgatcacggcatgatgctgcttattttttcggcattcatgtggcgttatttcggcaaagttgcaggtcttatcgcccttattatttttgtggtttttgcgtttcccagagtaatgattggcgcacactggtttactgacatcattgtcggttcgatgaccgtgatattgatcggtttgccctgggtgttgctgacgccattaagtgatcgattaatcaccttttttgacaaatcactaccgggaaaaaacaaacatttccaaaacaaataactcacagtaattaacatcatcaggtttatttttatagtgaggataatcctgatgatgcgcaccgtgctttcatctatcgaacgcaaaaatcattctctaagtaaatgaatggattgcatgcgtttcactcaatcgtactttaattgaccaatcccgcttattaactttctgtatcactttttcttataaaaaatcatgtaaaaccgctcgccaagaccgcaccaatcgggtaatctcgaactcgttttgcctcggcggtagattatcctcacagcatataattttgtgcgttagtccacagatttggccttaaggaattgtttcaacatgcccaggtaattagtctcgtgtcgcttggcatttttttataacgatatttgtcgttaaggacttcaagggaaaacaaacaacatggtcaaatctcaaccgattttgagatatatcttgcgcgggatccccgcgattgcagtagcggttctgctttctgcatgtagtgcaaataacaccgcaaagaatatgcatcctgagacacgtgtagtgggtagtgaaacatcatcactgcaagcttctcaggatgaatttgaaaacctggttcgtaatgtcgacgtaaaatcgcgaattatggatcagtatgctgactggaaaggcgtacgttatcgtctcggcggcagcactaaaaaaggtatcgattgttctggtttcgtacagcgtacattccgtgagcaatttggcttagaacttccacgttcgacttacgaacagcaggaaatgggtaaatctgtttcccgcagtaatttgcgtacgggtgatttagttctgttccgtgccggttcaacgggacgccatgtcggtatttatatcggcaacaatcagtttgtccatgcttccaccagcagtggtgttattatttccagcatgaatgaaccgtactggaagaagcgttacaacgaagcacgccgggttctcagccgcagctaataaaccgtttggatgcaatcccttggctatcctgacgagttaactgaaagcactgcttaggcagtgcttttttgttttcattcatcagagaaaatgatgtttccgcgtcttgatccaggctatagtccggtcattgttatcttttaaatgttgtcgtaatttcaggaaattaacggaatcatgttcatacgcgctcccaattctggacgtaagctcctgcttacctgcattgttgcaggcgtgatgattgcgatactggtgagttgccttcaatttttagtggcctggcataagcacgaagtcaaatacgacacactgattaccgacgtacaaaagtatctcgatacctattttgccgacctgaaatccactactgaccggcttcagccgctgaccttagatacctgccagcaggctaaccccgaactgaccgctcgcgcggcgtttagcatgaatgtccgtacgtttgtgctggtgaaagataaaaaaacattctgttcatctgcgaccggtgagatggacattccactcaatgaattgattccggcgctcgacattaataaaaatgtcgatatggcgatcttacccggcacgccgatggtgccgaacaaacccgcaatcgtcatctggtatcgcaaccctttgctgaaaaatagcggcgtctttgccgctctgaatctcaacctgacgccttcactcttttatagttcacggcaggaagattacgatggcgtcgccctcattattggcaatactgcgctatctaccttttcttcacgtttgatgaacgttaacgaattaaccgacatgccagtccgtgaaactaaaattgcgggcattcctctgaccgttcggctttatgcagatgactggacatggaacgatgtgtggtacgcatttttactgggcggcatgagtggaactgtcgttggcctgctctgctattacctgatgagcgtacgtatgcgccccggcagagaaatcatgaccgccatcaagcgcgaacaattttacgtggcgtatcaaccggtggtggatacacaagctttgcgagtaacgggcctggaagtactgctacgctggcggcatcctgtcgcgggagaaattccccctgatgccttcattaactttgccgaatcgcaaaagatgattgtgccgctgactcagcatctgtttgagttaattgcccgcgatgccgcagaattagaaaaagtgctgccggtaggcgtcaaatttggcattaacattgcgccggaccatctgcacagcgaaagctttaaagcagatatccagaaactgctcacttccctacccgcacaccatttccagattgtgctggaaattaccgagcgcgatatgctgaaagagcaagaagccacacaactcttcgcctggctgcactcggtaggcgtagaaattgctattgatgacttcggcaccgggcacagcgcgcttatctatcttgagcgttttacgctcgattatctgaaaattgaccgtggatttatcaacgccatcggtacggaaacgatcacttcacccgtacttgacgcggtgctgacgctggcgaaacgcctcaatatgctgacggttgctgaaggggtcgaaacgccggaacaagcgcgatggctaagcgaacgcggcgttaatttcatgcaaggctactggattagtcgcccgttaccgctggacgattttgttcgctggctgaagaaaccgtatacgccgcagtggtaaggtgtgcttacgtcccttattattcatagtgaaagcatgccggattgcggctaatgatgagtaaaaggaaatccgttgcagatgattgtgcgcatactgctgctgtttatcgctctgttcacctttggtgcgcaggcgcaggctatcaaggaaagctatgcctttgccgtgctgggcgaaccccggtacgcgtttaatttcaaccattttgattatgtgaaccccgccgcgccaaaaggtgggcagataacgttgtcagccctcggtaccttcgataatttcaaccgctatgcactgcgcggcaacccgggcgcacgcaccgagcagctgtacgacacgctatttacgacttccgatgacgaaccaggcagttattacccgctgattgctgaaagcgcacgctatgctgacgattattcctgggtggaggtcgctattaatccgcgcgcccgttttcatgatggttctcccattactgcccgcgatgtagagtttacttttcaaaaatttatgaccgaaggcgtgccgcaatttcgtctggtctacaaaggcaccaccgtcaaagccattgcgccgttaaccgtgcgcattgagttagctaaacccggcaaagaagatatgttgagtctgttttcgctgccggtatttccagaaaagtactggaaggatcacaaacttagcgatccgctcgccacgcctccgcttgccagtggtccgtaccgaattacgtcctggaaaatggggcaaaatattgtctattcccgcgtgaaagattactgggcagcaaacttaccggtaaaccgtggacgctggaatttcgacaccattcgctacgattattacctcgatgataatgtcgcctttgaagcgtttaaagccggtgcctttgatttgcgtatggaaaacgacgctaaaaactgggccacgcgttataccggtaaaaatttcgataaaaaatacatcatcaaagatgagcaaaagaacgaatcagcccaggatacgcgctggctggcgtttaatatccaacgtccggtattcagcgatcgccgggtgcgggaagctatcactctcgcctttgactttgaatggatgaacaaggcgttgttttacaatgcctggagtcgcacgaacagttattttcagaataccgaatacgcggccagaaattaccccgacgccgcggagctggtgcttctggcaccaatgaaaaaagatctaccgtcagaagtcttcacacaaatctaccagccgccggtatctaaaggcgatggctacgatcgtgacaacctgttaaaagccgacaaacttctcaacgaagcgggctgggtgctgaagggtcagcaacgcgttaatgccacaacgggtcagccactcagctttgaattattgcttcccgcaagcagcaatagtcagtgggtattgccgttccagcacagcctgcaacggctgggtatcaacatggacattcgcaaggtggataactcgcaaatcactaaccgcatgcgcagtcgcgactatgacatgatgccgcgcctatggcgggcgatgccgtggcccagttccgatttacagatttcctggtcatcggaatatatcaattccacttataatgcccccggcgtgcaaagcccggttatcgactcgctgatcaaccaaattattgccgcgcagggaaataaagaaaaattactgccgttggggcgagcattggatcgcgtattaacgtggaattattacatgctgccaatgtggtacatggcggaagaccgtctcgcctggtgggataaattctcccaacccactgtacgccctgtttacagcctgggtatcgatacctggtggtatgacgttaataaagcggccaaactgccgtcagccagacaacagggagagtagatgggcgcttacctgattcgccgtctgttgctggtgatcccaacattatgggcgattatcaccatcaactttttcatcgtgcaaattgcgcctggcggtccggtcgaccaggccatcgccgccattgagtttggtaatgccggagtattacccggcgcaggcggtgaaggtattcgcgccagccatgcgcaaacgggcgtcggcaatatcagcgacagtaattaccgtggcggacgcggattagatccagaagtgatcgccgagatcactcatcgctacggtttcgataagccgatccacgaacgttacttcaaaatgctctgggactacatccgctttgattttggtgatagcctttttcgcagcgcctcggtgctgacgctgattaaagacagtctgccggtttccatcaccctcggattgtggagcacgctgattatctatctggtgtcgattccgttaggcattcgcaaagctgtttataatgggagccgctttgacgtctggagtagcgcatttatcatcatcggctacgccattccggcctttttgtttgccatcctgctgattgtcttcttcgcgggcggcagctatttcgacctgttccctctacgcggcctggtttccgctaactttgattcgctgccgtggtatcagaaaatcaccgattatctgtggcatatcacgctgccggtgctggcgacagtgattggtggctttgcggcgctgaccatgctgaccaaaaactcattccttgatgaagtgcgcaagcaatacgtggtgaccgcgcgtgcgaaaggggtaagtgaaaaaaatattctctggaaacatgtgttccgcaacgccatgctgctggtgattgccggttttccggcgacgtttatcagcatgttttttaccggctcgctgctgattgaagtgatgttttcactcaatggccttggcttactgggctacgaagcgaccgtctcgcgcgattatcctgtaatgtttggtaccttgtatattttcaccctgattggcctgctgctgaatattgtcagtgatatcagctatacgctggtcgatccgcgtatagattttgagggacgttaatgtcgcgactcagccccgtcaatcaggcccgttgggcgcgttttcgccataaccgtcgcggctactggtcgttatggattttcctcgttttgtttggtttgagtttgtgttctgaacttatcgccaacgataaaccgttgctggtacgttatgacggcagttggtatttcccgttgttgaaaaactacagcgaaagcgattttggcggcccgctggcaagtcaggctgattatcaggacccgtggctgaaacaacggctggaaaataacggctgggtactgtgggcaccgattcgctttggtgctaccagtatcaactttgctaccgataagcccttcccttctccaccctcccggcaaaactggctgggaacggatgccaacggcggcgatgtgctggcacgcattctctatggcacgcggatctcggttctgtttggcctgatgctgactctctgttccagcgtgatgggcgtgctggcgggggcgctacaaggctattacggcggtaaagtcgatctctggggacaacgctttattgaagtatggtcggggatgccgacgctgtttttgattattttactttccagcgtcgtacagcctaacttctggtggctgctggcaattactgtcttgtttggctggatgagtctggtcggcgtggtgcgggcggagtttttacgcacccgtaatttcgactacattcgtgcggcgcaggcgcttggcgtcagcgatcgcagtatcatcctgcgtcatatgttgcctaatgccatggtcgcgaccctcacctttttaccgtttattttatgtagttcgataaccaccctgacctcactcgatttcctcggcttcggtctgccgctcggttcaccgtcactcggtgaactgctgttacaagggaaaaataaccttcaggctccgtggcttgggatcaccgccttcttgtcggtggcgatattattgtctttgctgatctttattggtgaagccgtccgcgacgcatttgatcctaataaggcggtgtagcatgacgcaaactctgttagcgattgaagatttgtcggtgggttttcgccatcagcaaaccgtacgtacagtagtcaatgatgtttcactacagattgaggctggcgaaacgctggcgctggtgggtgagtcaggttcaggcaaaagcgttaccgcgctgtcaattttacgcctgctcccttccccgccggttgaatatctctccggcgatattcgttttcgtggcgaatcgctgcttcatgccagcgatcaaacgttgcgcggtgtacgcggtaataagatcgccatgatttttcaagagccgatggtgtcgttaaatccattgcataccctggaaaaacagctttatgaagtgctttcactccaccgcgggatgcgtcgggaagcggctcgaggcgaaattcttaactgccttgatcgcgttggtatccgccaggcggcaaaacggctgacagattatccgcatcagctctccggcggcgaacgccagcgggtgatgattgcgatggcgctgttaacgcgaccggaattattaattgccgatgaaccgaccaccgcactggacgtctctgtccaggcgcagattttacagctgttgcgcgaactgcaaggcgagctgaatatgggcatgctgtttattactcataacctcagcattgtcagaaaactggcccaccgcgtggcggtaatgcaaaacggtcgctgtgtcgagcaaaataacgccgctacgctatttgcctcacccactcatccttacacacaaaagctactcaacagtgaaccgtcaggcgacccggtgccgttgccagaacctgcctcaacgttgctggatgttgaacagcttcaggttgccttccccattcgcaaagggattttgaagcgcattgtggatcataatgtggtggtgaaaaacatcagttttacgctacgagcgggtgaaacactgggtttagtgggcgagtccggttccgggaaaagtacgacgggactggcgctgctgcgactgattaattctcagggcagcatcatctttgacggtcagccactgcaaaatttaaatcgccgccagctgttacctattcgtcatcgcattcaggtggtatttcaggatccaaactcctcgctcaacccacgactcaacgttttgcagattattgaggaaggcttacgggttcaccagccgacgctttctgccgcacaacgcgaacaacaagtgatagccgtgatgcatgaagtgggattagatcctgaaacacgccaccgttatccggcggagttctctggtggtcagcgacaacgtattgcgattgccagggcattaattcttaagccctcgctgatcatacttgatgaaccgacatcatcactcgacaaaacggtacaggcgcaaatattgacgctattgaaatcattgcaacaaaagcatcaactggcctatttgtttatcagccacgatttgcacgttgtccgcgcgttatgtcatcaggttatcgtactgcgacaaggggaagtagtggaacaaggaccgtgcgcgcgcgtgtttgccacaccgcagcaggagtatacgcgtcagctactggcgttgagctgacgcttaaaaaggattgtagtttgaaaagggttcggcaattgccacaccaaaatttttcaatcggcatgttgcagcaaactcgtcctggcgatttacaaacaggcacggctcaccttcacactccagcaccgaacatggaacttcgatgtcgcttaacgcctggcttagtttatacatcaccgaccatgcattatcaccatccgggctaagcaatttaagcgccaccaggctgttgtcaccgcacggtccattttgcggaatcggttcaaccttcgaacctgcgaaaccagcagaccagcgatagttctgcggtagacgatggacgattgagagttgtaatgaagtcacttattttccccggaagtacatttacttcacaatttgtttacatcaattttaacacatcatcaataatccgtctttatacagatcgtaaagattgatgcctcgcctgagtggcctctatggctctgatttaagtaatatctgcgggcgtggtcacgtttgcggggctatatgtacccgtttctgcgatctaactcaacctttttaactacaatgatgtgactttttacataaattgattttacataaaataaacatatatcgggggaatgatagatttgtggttgacatgcatcaacaaaggaagccttttagcttcctcgttgtgcaatagatcaccgttttttcggccgactggcgtacagacagaagagaatggagctggttgcgcagaatgcaattgaccaaatcatcggccatgcagagttaaaggtcgcaagagaaagcaatgcgccaacaattgcccctatgccaaaacggaaggttcctgccagcgaagatgccgttcccgccatatggggaaactcatcaagaatgaccgccatcgcattggatgacaccatcgacacgcagcccacaaacgccgcaacgccaaccaccagcgaccagaatcccagccccagcagcgcactgatgaccatccacgccgccataataaactgtatccacaaccccgagcggaacatatttaacgcgccaatgcggcggacgaagcggctgttaaaaatggtcatcacgaacaggaaaacaatgtttagtgcaaagtaataaccaaagttttccggcgcgacgtggttaatttcaatgtagacaaacggtccggcgcttaagaacgagaacatcccggcaaagctgaaaccactggcaagcatataactcaggacacgcttatgacggaacagcgccgcaaagttaccaatagtggtacgaatgtgaaaaggctggcgacgctccggtggtaaggtttctttaatcaggaagaaaatcattgccgaagccagaatcgccgctaatgccaggatccagaagatgtaatgccagctcagccacaccagcacccaaccgccgacaatcggtgccatcagcggtgcaatagtggtcaccagcatgacaaacgacatcatccgcgagaactcttctttcgggtaaatatcgcgcatcagggcgttaatgaccacgctggccgcagccgcagccagcccgtggaagaaacgcatcacaatcagctgatcgatggtgtttgccaacgcacacgccaccgcggcggcggcaaacaccagcgtaccgccgagcaccaccggcttacgcccgaagctgtctgccatcggcccgtagattaactgccccaacgcaaagcccagaatataagtactgagggtcatctgcgtactgcccgccggtacgccaaactgcgctgaaattaccggtagcgcgggcagatacatatcaatcgacagcggcatcaacatggccagcaggccaaggataaaaacaatagcaaacgacgaatgctgtcgggtggtcacaacgggctcctgaaagtcattgaaaagttagacgacgctggcaatttcttcttcagttaacggacgatattcaccgggggctaaatcagcatccagcgtaataccgccaatacgttcacgatgcagctcaaccacgtggttacccacggcggcgaacatgcgtttcacctgatgataacgcccttcgctgatggtcagacgaacctgcgttggggtaatcacttccagcaccgcaggcttagtgagatctttttcgttatgcagctgcacgcctttagcaaattgctctgccgtatcgtcagctacaggtgattccagtgtcaccagataggtcttctcgcaatgatggcgcggagaagtaatgcggtgcgaccactgaccatcatcagtcatcagcaccagaccggtggtatcaatatccaaccgccccgccgcatgcagtttccacgctaccggttcatcaagaaaatagagcaccgttgggtgatcagggtcgtccgtggagcaaacatagccctgaggcttattgagcatgaagtaacgtggaccgtgttgctgcgccagcgggttgccatcgtaagcgacatcatgttcaggaagcagtttgaacgctgcattacggacgatttcgccatcgacggtgacacgattgccgcggatttcacgcccggcaatagcacggctaacgccgagttgctgtgcgataaatttatcaagtcgcatgtgtgtgattttgcctgtaaaaacggaggtcgggcattgacccgaaaatctgaactgttgtctgcccagtatagcggtctaataacatccctcaagggaaaaagatccatggcatactattagcagaataatctacctacgcgagaccatgatttttacacttcgcccatatcagcaagaagccgtggatgccacgctcaaccattttcgtcgtcataaaacccctgccgttatcgtgctgcccaccggcgcaggtaaaagcctggtgattgccgaactggcacggctggcgcgtggtcgtgttctggtgctggcacacgtcaaagaactggtggcgcaaaaccatgcaaagtatcaggcgctggggctggaagccgatatttttgccgctgggttaaagcgcaaagagagccacggtaaagtggtatttggcagcgtgcagtcggtcgctcgtaatcttgatgcctttcagggtgaattttcgctgttgattgtcgatgaatgccaccgtattggtgacgatgaagagagccagtatcagcaaatcctcactcacctgactaaagtgaatccccacttacgcctgctggggctgactgccacgccttttcgattgggcaaaggctggatctaccagttccattatcacggcatggtacgcggcgatgagaaagcccttttccgtgactgcatttatgagctgccgctgcgttatatgattaaacacggctatctgacgccgccagaacgactggatatgccagtagtgcaatacgatttcagccgcttgcaggcacagagtaacgggctgttcagcgaagctgatctcaaccgtgagctgaaaaaacagcaacgcattacgccacatatcatcagccagatcatggagttcgccgaaaagcgcaaaggggtaatgattttcgccgccaccgttgaacacgcaaaagagattgtgggattactgcctgccgaagatgctgcactgattactggcgacacccccggcgctgagcgcgatgtgttaattgaagattttaaagcccagcgttttcgctatctggtcaacgtcgcagtactgaccaccggatttgacgccccgcacgtcgatcttatcgccattctgcgccctaccgaatcagtgagtctttaccaacaaattgtcgggcgcggtctgcgtctcgctccgggcaagactgattgtttaattcttgattatgcgggtaatcctcacgatctctacgcgccggaagttggtacaccgaaaggcaaaagtgacaacgttccggtacaggttttctgccctgcctgcggttttgccaacaccttttgggggaaaacgaccgccgacgggacattgattgaacactttggtcgccgctgtcagggatggtttgaagatgacgacggtcatcgcgaacagtgtgacttccgtttccgttttaaaaattgcccgcaatgtaacgcagaaaatgatattgccgctcgccgctgccgcgaatgtgacacggtactggttgatccggatgatatgttaaaagcggcgctacgactgaaagatgcgctggtattacgctgtagcggcatgtctttgcagcatgagcacgacgagaaaggcgaatggttgaaaatcacctattacgatgaagacggcgcggatgtgagtgagcgtttccgtctgcaaacgcccgcccagcgaactgccttcgagcagctttttatccgcccgcatacgcgcacaccgggcatccctctgcgctggatcaccgccgccgatatcctcgcccagcaagccttattgcgacacccggattttgtcgttgcccgcatgaaaggtcagtactggcaagtgcgtgaaaaagtgttcgattacgaaggtcgttttcgtcgggcgcacgaattacgcggttaatggtagttttgattgatgtataaagcgattgagtatagaatctcgcccgcttttgcatacgcaaagcagatcacttacctgttgctgggtcgcctgtagcaggattaatttaagagagaaagaaatgtttactatcaacgcagaagtacgtaaagagcagggtaagggtgcgagccgccgcctgcgtgccgctaacaagttcccggcaatcatctacggtggcaaagaagcgccgctggctatcgagctggatcacgacaaagtcatgaacatgcaagctaaagctgaattctacagcgaagttctgaccatcgttgttgacggtaaagaaatcaaagttaaagctcaggacgtacagcgtcacccgtacaaaccgaagctgcagcacatcgacttcgttcgcgcttaattgctgaataagttgtaaaaaaccccgctccggcggggttttttgtatctgcagattatgcctgattacggtattgctattttttgcaggccagataaggcgttcacgccgcatctggcattcagaacacaaaaccgattaattgccgccagacgtccggcgctgcaattggtcacgcaaattcggcggcgtgcctttaatggtcagggtatcggttgccggatcccagaagatgcgttcacctaacagcatcgcatcaaagttaatagtcaagccaccgccgctaccggcaaacttcgtcaactgacgcagtgtgctacggtctgccgggaagctctcttccagttcgtagcctttttcagccgcaaactccgtgaaactcacttcgctgacgcctgccagctctttcgacagcgactccagttcgatctcttcgcctgcctgcagctgctcattacagtagctataaacctgctggcgcacgttctgtcgctctgctttatccagttgtgcttcggcagtgaaatcatcaaccgcttgcaacagcccacggttttgcgctttcgcgtttaacccttcgctggccccgaggaaatccataaagaaatccgccactttgcgccctactcgccctttcaggaaagtgagatagcgggtggactctggattggtttcccattcggttaaatcgatacgcgcaacaatatccgcatgattgatatcaagataatgggttggattgatgtcgagattttcgttaacgcgcatactgctcaggttgctcagaactgccaccagcagatactccaccgccagataacggtagtggcaaaacagcacgaatccaccgtcagcaaaaggatatttcgctaattcgtcacgcaggcgcccggttgccgcgcggctaaatgccagaaagtcctcttcgccctgacgctgtaagcgcagcgtctgcgccagttcactctcttcgctaaacaagccgtaagctttatttttggcgctatagacccgatgcagttctgccaccatctcaacgacggtttctgtcggttccagcaatgaatcgcgcaacaccagctcaaggttctgctcatcacgcttgataagctggtgcagagcaatctggttgatatccagactcatgataaactctcctttaagaccgggcggtattcaaccaccgccggttaagcgacgcaataaaagatggcggtcattttacagaaggcagcgtaacgagaatgatttaacgcataaaaaagcagaaaaaaaaccgttgctacggtaatatgttgccctttcatcaactaactgatttcgatttatgccacaaatttcccgctacagtgatgaacaggttgaacaattgctcgcagagctgctcaacgtactggaaaaacataaggctccgaccgacctttccctgatggtgttaggcaacatggtcactaaccttatcaataccagcattgccccggcccaacgccaggcaattgccaactcttttgcccgcgccttacagtcctctatcaacgaagacaaagcgcactaagggaaacagataacaggttatggtaactcatcgtcagcgctaccgtgaaaaagtctcccagatggtcagttgggggcactggtttgcactgttcaatattctgctttcgctcgtcattggcagccgttacctgtttatcgccgactggccgacaacgcttgctggtcgcatttattcctacgtaagcattatcggccatttcagcttcctggtgttcgccacctacttgctgatcctcttcccgctgacctttatcgtcggctcccagaggctgatgaggtttttgtccgtcattctggcaacggcgggaatgacgctattactgatcgatagcgaagtctttactcgtttccatctccatcttaatcccatcgtctggcaactggttatcaacccagacgaaaatgagatggcgcgcgactggcagctgatgttcatcagcgtgccggttattttattgcttgaactggtgtttgcgacgtggagctggcaaaagctgcgcagcctgacgcgtcgtcggcgcttcgcgcgcccgctggccgcattcttatttatcgcctttatcgcctcgcatgtggtgtatatctgggccgatgccaacttctatcgcccgatcaccatgcagcgcgctaacctgccgctttcgtacccgatgacggcgcgacgttttcttgagaagcatggtctgcttgatgcgcaggagtatcaacgccgtcttattgagcaaggtaatccagacgccgtttccgttcagtatccgttaagcgaactgcgctatcgcgatatgggcaccgggcagaatgtgctgttgattactgtcgatggcctgaactactcacgcttcgagaagcagatgcctgcgctggcaggttttgctgagcaaaatatttcgttcacgcgccatatgagctccggcaacactacagacaacggcatctttggcctgttctatggcatctcgccgagctatatggacggcattctgtcgacccgtacccctgcggcgttaattactgcgcttaatcagcaaggctatcagctgggattattctcatcagatggctttaccagcccgctgtatcgccaggcattgttgtcagatttctcgatgccgagcgtacgcacccaatccgacgagcagaccgccacgcagtggatcaactggctgggccgctacgcacaagaagataaccgctggttctcgtgggtctctttcaatggcactaacattgacgacagcaatcagcaggcatttgcacggaaatatagccgggcggcaggcaatgtcgatgaccagatcaaccgcgtgctcaatgcactgcgtgattctggcaaactggacaatacggtggtgattatcactgccggtcggggtattccgctgagcgaagacgaagaaacctttgactggtcccacggtcatctgcaggtgccattagtgattcactggccaggcacgccggcgcagcgtattaatgctctgactgatcataccgatctgatgacgacgctgatgcaacgcctgctacatgtcagcacacctgccagcgaatattcgcaaggtcaggatttgttcaaccctcaacgccgtcattactgggttactgcagcggataacgatacgctggcaattaccaccccgaaaaagacgctggtgctgaacaataacggtaaataccgcacttacaacttacgtggtgaaagagtgaaagatgaaaaaccacagttaagtttgttattgcaagtgctgacagacgagaagcgttttatcgctaactgattaattataaatcagttagcaaaatatcttacttgcaatcggtgtggaaaacggtagtattagcagccacgagtcggcacgtagcgcagcctggtagcgcaccgtcatggggtgtcgggggtcggaggttcaaatcctctcgtgccgaccaaaaatcccaagaaaaaaccaacctttacggttggttttttttatatctgcaattaattcgataaacagaccgtgacacatcacagcctgtttattttttgttatcagaacgtccagaccacacccgcctgagtattccacggcgattctacccctgcgccattgccatagctgactgacaaatgaccgcttaacgtcggggtaaacgatgaccttatcccagcctgataaacgccacgggttccagccacatcattattaaatttgccatcgtcattaactttcacctggttagaatcggcgtattcctgacgcacggcggctttcagtcagggttccagcgtcgtaccgttttgcaggtccatgtgatagcttaccgccgttcccgcttcagcgcgtaatatccgggtatttcccacatccgcgcgcatgccgtttgataacgtgtagtcctgaccatctgtggtaaagccggtaaaggccagatagggtctaacactccacaatccgtcaacccaacggaacccgctctcgacatgagcacccgcgccgttactattgtaatcgccaaacgctgttgccccattactcatcttgcaatggatggtgttggcaaaacggtcaactttcaccactccatcaacataggcaccgttctgatgctcccaaccggcataagcccccagggtatagctatcgacattgcctttgccgccgcgatcaaaaccaatatcagaatgagagtaaccaaagaacaagccgcgaattgtgctggtttcttcacgggagaaacggctatcgataccgagcgtcagcccggtcaatgtttgctcaaagccagcgcccgcatcagtggtcacgttgttgcgggtgttaattgccgaactccacatcgccgtatcgtaattaacgccttttacgctaccaagacgctcacgcacggtgtccagttctgcatcaaataccagcggttgtgctgccgccatattcagcacatcagtggttgaaggggtaatttgcgcgcgattctctgccaaactccagctatggttgccattatccagcaaggtatattcatacgtaccgatatcaacaacgcctccggcattgcccaacgtaaatgcagcatcaccgccgcccgttgttaccagtgtaaggctatctcctgctgccgggctggcaccggtgtccgtcacgaatattttgaaatcacctgttgcctgaccggtgacgttgagctgatcgctctgatgattagccatatcggtacgcatataaaaattgccgtttcccgacagggtattggtggtcaacgtaatgaaattttccgcacttgccgtcactgatgaacgagtcactggctcatccatcataatcacatttgcgtcagacatcgcaaggttggctaagttgaggagggtgttttggttcgtcgtagtgatatcggcaatgatggtccatacgctattttcgagcgaaacgtccgctttgctggtatccacggcaccatgcgttctaaaagaagcgccctcagaaaccactaccttacccaccaacattgcgggtgcataatttatttgcggcttcatgacctcaagaatgccatcattccctctgactgaaacgttaaccattgtgccagcccagacgttagcgcggccattgttgataaccatattttcagagatggcttttgaggaatacgtgatacttccattctgatctgatcgaccgagatcatataccgcatttgcctgcactttcgtaccagtatcctttcccagcgattgcatagtggcatgctcatcaaggatagtatcaatggcctgcgtgtcctccataacaatgagcccggaaccatcatccagttcataattttttgacacaccatcttttatactaaattggcctttactgtttgtaccactcacttccagcgcattcgttgagacaattaattttccgcctgcttttttatcaacgccagttgcagtcccgccatccataacctccagtaagccgccactatctacagtagtattataagcgaagtcattttcttcaactcgcaaacttccgccgttttccaacagcatattgttagcaataccattcttgatttcgaactgaccgagacggtttgttccgaatacctccatgacccgcgtgcttgctttaatagcaccgcctgctttctgatctaccgcaatcgctaatcccccctctttaacctccagtaatcctcccttttcgatagcggcaaggacggtaatcccatctttttcaacgattaagcgcccgcctttaatcgtgggatcattcgctgcgccataaacctgtagcacaccattattgagggtagtctggtttgccgcgccacccatttgaacaatttgataaccgtcatttaatactgagtattctgcggtaccattcatttcaatgtactgataccctccgttaatttcagtattactacttacaccaaattcttttatatgctgttctccgccaggattgattttcgtattattggcggtcccataaaccagctggatatctttttccaggacaacaccatcaacagtctcaccatactcaactgttgatgccaatgctatgggtgaatataacgctgtagccaccagaacagatattgcggaacgacaaagagaaacagaaccagattgatgaattgagctttcatcctatgaaattaattgctgttaaaagcattgggtacggaaaatacccatagctccatacccggagtcagtttttaaaaactgtttaaagaaatgcacaagtattgtgattgattttttagttgtttttcttgatgagaagctgatgcaaaattccgtctttataatgaaaatgatgccaaagcgaacgacaaggttgtagttttcactacatgtccatacataaaatggggtaacattcacgcgcctggtagcgttaccaacgctacgctcaaacataatgattctaataaaacctcaggagactactatgcctgaagcaacgccttttcaggtgatgattgtggatgatcatccacttatgcgacgcggtgttcgtcagttactggagcttgatcctggctttgaagtggtcgccgaagcgggcgacggcgcgagcgcgatcgatctggcgaatagactggatatcgacgtgatcttgctggatctcaatatgaaaggtatgagtggcctggataccctcaatgccttgcgcagggatggcgttaccgcgcaaattattatcctgaccgtatcagatgcctccagcgatgtctttgcactgatagacgcaggcgcagacggttatctgttgaaagacagcgacccggaagtattgctggaagcaattcgtgctggagcgaaaggcagcaaagtctttagcgaacgcgtcaatcagtacttacgtgaacgtgaaatgtttggcgcggaagaagatcccttcagcgtgctgacggagcgcgagctggatgttctgcacgagctggcacaggggctgtcaaataaacagattgcctcggtgttgaatatttcagagcagacagtaaaagtacatattcgcaatctgctgcgcaaactcaatgtccgctcacgcgtggcagccaccattctgttcctgcaacaacgcggggcacaataaaaatagcccgatggcatcaccatcgggcctctttttatttactctcctgcggcgacaaatgttgcatcgcctgcgcgatactacgttcaatcaccgcacggcgagtatcgttggcaggtaagagtttcaacatcatctcccacgcggcaacggcttcgccaaatcgctgctgctcaaaggcattaaacgcatacatgcttaacacacggatattgctgtggtcgcttctcaccaactggcgcagcagttcaccaccgaggcggttgtcgttgggatcagatgaacgtgtcaacgcttcagcataacccagtgcggcatcgctgtttttcggatcgaggcgatacgcagtagcgtatgcatcggtggcgatactagcgttacccagcgccatgccaacgcggcccaacataatccagccttctatatctcccggattttttgcagttgagtacgcatccccagcgcaagacgcgacatctcttcttcgttgagcggatcggctttcggatccagcgccctgtccagcaacgccggagcctgtgccgtggcctgctgccagattttcacctgctgataattgccagtctggtagtagctgacgccagccacaattaacgccaccacaatacccggcagataaacaatatatccggcacgcttaccttcctgcacgctttgttcaggaaacgcttccggcactacgcgtacccgacgccgcgagcgggcgtatatgacccaaccgccaatgccaatagccactaccggaagtacccacagcagcacggtcagcggcgttaacggcggatcgtaagtgacgaagttgccgtaacgcgccaccatataatcgacaatctcttttttacttttaccttcctgcatcagttcatacactttctgacgcaggtcggtggcaatcatcgagttggaatcggcaatgctgttgttctggcatttcgggcagcgcagttcttcagtgagctgacggaactgttgttcctgtgcttcatctttaaactgcaacacgtcgatggtcgccagtgctgagccggagatcatcagcatcagcacgcccaataaaaacctcattgtgcggcctccttactgtatttctcccacagcggcttgatctcttcttcccagacgcgaggattgagatcgcccgcatggcgatagcgaatgataccgttgccgtcaataaggaaggtttctggcgcgccatagacaccgagatccagccctaacatgccgtcgccatcaaacaggcttagcgcgtaaggattgcccagctctttcagccagctgattgccttctggcgatcgtctttatagttcatgccgaccacgcgaatgccctgcgctgaaagctgattcagatattgatgttccgcacggcaggtcggacaccaggtcgcccagacgttaagcagcactggtttgccctgagtcagcacatccgcctgataaaactgccccggattgtccagtgattcgagacgaaacttcggcacaggcttgccaatgagcgccgattccagattggtcggatcatccccttcggcattacgcgccagctgccacagcagcgccgcggcaatcgccaggaagataatcaacggaattaacaatactttgcgcttcatacggcctccggcgcagttttttgcggactcacgcgcttacgatagcgaggatcaaacagacacagcagtccgcccaacgccatcatcagcccgcccgcccaaatccagcgaacaaatggtttgtagtaaagacgcacggcccacgcgccgttttccagctcttcaccgagcgcggcgtacaggtcacgcgtgatgccgccgtcaattgccgcttcggtcatcatcgacccggcagtgttgtaataacgtttttccgcatacagcaccgtttccggcttgccatcgcgcgttacgccgatagtcgccacaccgccacgccagttcgggccagtcacctctttgacatcacggaaggtgaagcgatattcatgaatatcgacgctatcgccggacttcatgcgcacatcacgctcaacgctatagttctggctaaaggcaataccaacaattgtcactgccagccccaggtgagccgccaccattccccaataactgaaggtggttttcgtgccacgtgaaatacgcagcgcagcttccgcaattgccagcacagcaatccagcaggccattgccaggccgagcaccgtcatcgccacaactttgctttcgaacagccacggcagcagcagcgacagcaccagcgttgagatgaaggcgataatcaataaattgcggattttacgtgggcgatcgcgcccccagcgcaccagaggaccgacaccaagcagcagcgcaaacggcaccatcagccaggtaaacatggtgttgaagaacggttcgccaatcgaaatactgcccagtcccagttgcttgtgcaccagcggcagcagcgtccccagtaataccaccagcatcgcggcgaccagcaaaacgttgttcgctaacagcagagattcccgcgaccacagcgcattgtttacgcgtgagcgaactttgtgtccacgcgcggcaaacagcagcagcgaaccaccaatcaccagtaccataaaggcgaggataaacataccgcgtgccggatcagaggcaaacgcgtgtaccgataccagcacgccggaacgcaccaggaaagtccccagcagacacaacgagaaggcactgattgccagcagtaatgtccacgctttgaagctggcgcgttgttcagtgaccgccagtgagtgcatcagcgcagtccccaccagccacggcataaacgaggcgttttctaccggatcccagaaccaccagccgccccagccgagttcgtaataggcccatgcggaaccgagcacaatgccgagcgtcaagaagatccacgccgccagcgtccacggacgagtaaaacgcgcataagtgctgtccagacgcccgctcaacaaagaagcaatggcaaaagcaaacgccaccgagaaccccacgtaccccatatagagcagaggcggatggaagatcagccccggatcctgtaacagcgggttaagatcgcgcccttcaatcgggaagttcggcaacgtgcgtgagaacgggttagaggtaaagagaatgaacagcaaaaagccgacgctgaccatccccattatcgccagtacgcgggccacaatatccagcggaatacgctgactaaaaatcgctaccgcaaaggtccagccgctcatcagcagcacccacagcaggagcgagccttcatgcgcgccccaggtagccgccacgcgataccacaccggaagctgggtattggagttgctggcaacataggtgacggtgaagtcgttgaccacgaaggcattgaccagtaccagaaatgcgccagccacagacataaacagcagccaggcaaacaagcgggaagacgccatcatgcgcgcatctccgcgcgctacgccccatagcggatacacggacagcagcagcgcaattcctagcgccagacacagcagcccgttaccaatttccggcatcatgatgctgggtccttataaacactcgccgggcgacggtgattggcttccatcgctttctcaacttctggcggcgtgtagttttcgtcgtgtttcgccagcacttcttttgcgaggatatgattgcctttttccagttcgccctgcaccacaacgccctgcccttcacggaacagatccggcaaaatgccttcgtaagagacatctactgaaccttcagcgtcgtaaatggtgaaagttacttttagcgaattgggatcgcgctgcacactccccggcatcaccatcccgccaacgcgcagacgctgaccgacttccggcatctgctgagtctcacgcttgccgtagagaatctcccccggcgtataaaagagatcgatattcgagcgcagcgcatatagcaccagaccgatagtcagcgccagccctgccaacacggcacaggcgatccacaagcggtttttacggcgaatattcatgcagcctcctgctgttgcgcagcacgtaaacgcgcctcacgcgcccgctgttgcgccacaccacgcagaattgcgcgatgctgcatcaccgagtgcacgaccaaaaccaccagcggaataacggtcatcaccaccgccagccagacaaaaaaggcgtaaccgcccattgcgaaaaattcattccaggaagcaaatgcaggggtcatttacggcctcttttcagtatcagttcactcacccacggacggcgtttttccatcagcaaaatcaaattacgcatccgcatcagcgtcagcgtggcagacagcagcaggaagccaaaaatcgaccagcgcagcggcgaacgcatcgccggatcgatactttgctgcattcgcgttgatccctgatgcagggtgttccaccactccacggagtaatgaataatcggcagattcaccacgccaatcagcaccaggatacctgccgcacggcccgccagacggcggtcgtcgaaggcgtgccacagggcgatcacacccacatacaaaaacagcagcaccagttcagaagtcagacgtgcatcccatacccaccaggtgccccacatcggttttccccatgcagagccggtaaccagggcaataaaggtaaacactgcaccaatgggggccatcgccgccaccgccaggttggccattttcatctgccagacaaggccaataaacgctgccactgccattgatgcataaatgcccatcgaccagatcgccgcaggcacatgcaggtagataatgcggtagctatttccctgctgataatcagccggagcaaagccgaatccccagatccagccgacggtaagcacgaccacactggcaattgccagccacggtataaaccagccacagatttgatacagccgtggtgggatcgccagttgatgcagtgttttccacatagtttcgataccagactcgaacaaaaatcagtaatccagcgttattgaatgctgattcgtaacgctgccgccgtcgcaaaaggacttaatgtcgcggtgcctgccagcaacgcgcctaaaattgccagatacccgtcaacgggcaaatgcatggaagccgcgtccatcgcggcggtggcaaagatgagtaatgggatagtcagcggtaacaccagtatgctgagcagcaccccaccgcgcttaagtcccactgtcagcgccacgcccggtgcaccgagaaagccaagcgtaggcgttcccagcagcagcgtcagcgccatcacttgccagccataaacatccattcccagtagcattgctaccaggggcgaaaggatgagtaacggcagaccggttaccatccagtgcgccatcaccttcgccagcacaacggcgggcaagggtaacggcaacaacatcaattgttcaagactgccgtcctgcaaatcgtcacggaacagtcgttccagcgccagcaaggatgaaagcagcgcagcaacccagataatgcccggtgcaatacgcgccagcagttgcggctccggaccgatactgagcggaaaaagggtaattacaatcaggaagaaccacagcgggttggcgatttcggcgctatggcgaaacgctacgcgcagctcaagacggaaaatgcgccagaacatcatgcggccctcgtttgcgtcagtgaaatgcggcgaattttactttcagcaacgttgagcggctggtgggtagtcagaatcacaatccccccctgctccgtatgctgcgccatacgctgggtcagacgatcgacgccgttaacgtcaatcgcggtaaaaggctcgtcgaggatccataacgtggcacgggtcagccacagacgcgctaaagcgacgcggcgttgttgcccggccgagagctgatttacaggaatatcttcgaatccggcaagcccggcctgcgccagggcttccagacattgtgcggtatcgccatcgcgatgataaaagtgcagattttctaacgccgtcagccgggttttgatccccggctgatggcctatccataacaggttttgatggtagctgtcgcgtacctgatgcaagggctgcccttgccagagaacctcgcctgcgtcagggcgagacaaccccgtcagcaaacggagaagcgttgtcttccccgcgccgttgctaccggtgatttgtacccactctcctgcgttcagcgtaaatgacaagccactaaataaggttcgttcatcccgctcacaaagtaactctctggcttcaagcatacccacgcaataaccctgttaaaaacctggctcgacttcacgcatatcgggcagcttgtgcgctatccctttatggcaatcaatacagatttgcccatctttcaccgcctggtcatgcatcttcgcggcaaccgatttctgggcggttgtatccatatactcgaagttgtgacagttacggcactcctgcgagttattgtccttcatgcgccgccactcattctgtgccatcgtcagacgatgagcttcaaatttctgcggcgtgtcaataacgccaaaaattttaccatacagctctttacttgctttgagcttgcgtatcatcttcggcacaaactcgtgcggaacgtgacaatccggacaggtcgcacggacgccgctacggttgttgtagtgcacggaatccatgtattcctgatacaccgtgttgcgcatttcgtggcagctaatgcagaactcttcggtattggctttttccatcccggtgttaaagccaccccagaagacgatgccgccaacaaaaccgatcaacagcagcgtccccagcgccagacggctgggggtacgccaccatttccacaggcgcttaatcagaccaggcttacggtcagaatttcccataataacctcttatttcccgtaaccttttgatggggtaaaggtattccccacgattggcgcggtatcggcctgcggtacgtgacattgcagacagaaataacgacgcggagccacttccgcgcccactttgccgtcgctgtccataaagtgagtaggactgatacgcggcgcgccagtggtgcgataactttcgacaccgtggcactgcaagcagcggttggtattggtcgttacctgataaccttcaacgctatgcgggatcattggcggctgattcacatagttcagcggcatccgttcctgctcttttggcatccgaatggccccttcctgtgtcccggatacttccggcgactggctaaaatcgacgccattagccgcccaaaccgcgccgcttaccaccagggccagcatcgccgtccattgacacagcgctttcttcaggtcatggcttttcatgatttcgctcccgaactccatcgtgtagttattgtaaatacatcctcagaacagacatccacgcagcgaccgcacgtcatgcaatcgcggctggtgacctgcaccgggctttgttcatccagcaccggggcacgtagcacatgcggttccgggcaaacatgaaaacaatccatacagcggttacatttctgccgatcggtggccgcaacggtaatcacacctttgctacccagcacgccatacagcgcgccaaccggacaaatgtgcccgcaccagccgtgttcaacgaccagtagatcaaataaaaacagcgcgagaataagcagcgcgccgctgccgaagcccattaccaggctgcgccccatcagagatacggggttgatccattcccagatgagcgtgccagttaaggccgatcccagcagaatgaccaccaacagcacgtagcgaatgtggcgagggatcgtcgcagactgattgaggtcaaagcgcctgcgtaaccagttcgctaagtcggtaatcgggttcagcgggcagacccagctgcaaaataatcgctttcccgccagggcgtagagcacggtgataatcaccgcaccggtcaacgccaccgtggcaggcagatgaccactggcaagactttgcagcgtcatcagcggatcggtcagcggaacggtgtcgaataacaggctactgctgtagttgccgtgcaagatccacacaccaaaccatggaccgctcaaaaacatccccagcacgaagaactgacaaaggcgacgtaacaccagccaacggtgactgcgccaccagccttttttctccagcgcctcgcgcccggcgtcacgtttacgatttgccattgttcccctccagccaaccgaagcggtaatggtgacctaactcccctttcgccagtgacagcggtaacaccttgattgccggttgttccagcacgcatactttttcgcacttaccacaaccggtacaggcgtcgctgtgaaccgtcggcagaaagcgggcgtgcttaccggtacgcgtgttgcgctccagctccagggtgatggcctcatcaattttcgggcattcgcgataacaaacatcgcagcgcagcccctgaaagttgagacagttttcctggtccaccagtaccgccagccccatccgcgcgtcgtcgatcgattcaatctcacgatccagcgcaccgcttgggcacactttggcgcacggaatgtcctcacacatttcgcaaggaatatcccgtgcgacaaaatatggcgtgcccgccgacagaccagaggccagcgtcgccagttttaaggtgtcgtaagtgcaagcctgaacacactgaccgcaacgcacacaggcactggcaaaggcgttctcgtttatggctccgggcgggcgcaaccgcacgccagatgcgcgtgcggtttgctgttgtaaccccagcgccacacccacggcagccagcccgcctgctgtgcgaacgacatcgcgcagaaagcggcggcgaccattttgaggtttcgctgaccgggacataatggcttacaccttctccagtttgactgcgcacttcttgaagtccgtctctttcgagagcggatcggtcgcatccagcgtcagtttgttaaccagctgtgcggcgtcgaagaacggcatgtacaccaggccctgtggcggacggttacgaccgcgcgtttcaacaatcgagatcacttcgccacggcgagaaaccactttcactttgtcgccacggcgcagatcgcgcgctttcgcatccagcgggtgaataaacaagaccgcttccgggaaggcgcggtgcagttccggcacacggcgagtcatactgccggtgtgccagtgctccagaacgcgtccggtagagagccacaggtcgtactcttcatccggtgcttccgccgccggttcgaacggcagtgcgaagatcaccgctttgccatccggtttaccgtagaacttatagccttcgcccgctttcacgtacgggtcgttaccttcgctgtaacgccactgtgtttctttaccgttcaccaccggccagcgcagaccgcgcgctttgtggtagtcatcgaacggcgcgagatcgtgaccgtgaccgcgaccaaaccatgcgtactcttcgaacagccctttttgcagatagaagcccagctcgcgggattcatcgttcagctgatcttccgccagttcggataccgggaatttgctcacttcgggggtggcatacagaacttcgtacagcgttttgccacgcagttccggtttcttcgccagcagctcttccggccatacttcttcagttttgaagcggcgggagaactggactaactgccagagatccgatttcgcttcgcctggcgcctgtacctgctgacgccagaactgagtacggcgttcggcgttaccgtaagcgccctctttctctacccacattgcggtcggcaggatcaagtcggcggccagcgcactgactgtcggatacggatcggagacgatgatgaagttgcgcggatcgcgccagcccggcatacgctcttcattgatgttcggcccggcctgcatgttgttggtacacatggtccagtaaacattcagcttgccgtctttcagcgcacggtcttgtgccaccgcgtgcagaccgatttttgccggaatggtgccgcccgggatattccacttcttctcgcagatatcacgatgtttctcgttagtcaccaccatgtccgcaggcagacggtgagcaaaggtgcccacttcacgcgcagtaccacacgcagaaggctgcccggtcagggagaacggaccgcaacccggctgggaaattttgccggtcagcaggtgcaggttgtagaccaggttgttggcccacacaccacgggtatgctggttgaagcccatcgtccagtaggagatgactttcttgttcggatcggcatacagctgcgccagttgttctaactggtctttcggcacgccggtcatttcagcggttttttccagcgtatactcagcaacgaaggctttgtaatcttcaaagctcatcggttcggaggcgtcagaacccggattcttcgctgctttttccagcggatgggtcggacgtaaaccgtagccgatgtccgtcgcccctttgcgcaggttaacgtgcttgctgaagaagtcctgatttatcgcattgttttgaatgatatagttggcgatgtagttcaggatcaccaggtcagattgcggcgtaaagatgatgccgttatccgccagctcgaagctacgatgctggtaggtagaaagcaccgccacggtgacgttctggttagagagacgacggttagtgatgcgtgaccagaggatcgggtgcatctccgccatgttagcgccccacagcacaaacgcgtcagcctgctcgatgtcgtcatagcagcccatcggctcatccataccaaaggtacgcataaagccaactactgccgacgccatacagtgacgtgcgttcgggtcgatgttgttcgaacggaagcccgctttgaacagcttggacgcggcataaccttcccagatagtccactgaccagaaccgaacataccgatcgattccggtcctttttctttcagggcggttttgaatttctcttccatcacatcgaaggcctgatcccaggtgattggggtaaattcgccttctttgtcatatttaccgtttttcatacgcagcagcggctgcgtcaaacggtctttaccgtacatgatcttgggcaggaaatagcccttaatgcagttcaggccacggttaaccggtgcgtccgggtcgccctgacaggccaccacacgcccctgctgcgttccgaccagaacgccgcaaccagtaccgcagaaacggcacggcgctttatcccatttaatggcttcctgctgaccaacaacggcgcgggcaacgcccggcacgctgagaccggcagccgccgcagcggccgcaacggcgttagctttcataaagctacgacgactgagtttcatggtgtttcctcaccttgctcttcctgctggtgataaaccagcgacaccgccagcacgccctctacgttgcgtactgactcaatggtttggatcagcgtttcgctgtcttctgcttccaccaccacaatcaactgaccgctcggcgcgtcgctgacagcaacttcacagccgggaaaggcgttcagttgggtgctgatgtctgaaattcgttcgcttttggcctgcacgaccaggctgcaaacttgccagttagtgtgcatggagatactccgcagttatggctgataccggacagctggctgcacatgctccacatccgttgcaaagttggctattaagttgcggctggtagattccggagagcgtcgggcgaaagataattgccattggctcacagctatcctgacagcggcggcattcaactgactgatacgccaggcacgcgtccccaatggtgaactgcaaatcccaggccctggtgtggcgcggagaaaatagcgattcggggcaagcctgcgcgcaggcgtaacagaagctgcactcgttatttttgaaattaacgctcggatagccgcccgcgccgcgttgcagaatgttgttttcacaagcattaatacaggcgtcgcaacgggtgcaatgggtcagaaaatgagattcatcaccggaccagggtggacggataccgttactggctttgcgccagcgaccagtgagtatgccccgacgggatgcatcaatcttcacattgaccttccatcattaacgcgctctgaaaattgagagcgaccaaataaaccgcataattaataagccatttttatagccgctaagatattaaaggatgtgtcaaagatgcataccccgatcggggtaaaacctgtagcaggatcaaaagagtggcgggaagcgtggcaaaaacgggcttttgctcacatttcaaatggttataaacatatttatatagcgattaattcaccagagatatttctgctggtttgctccctcatcagaatttaacactaaaagagcaggtaaaattgtctgaatgttctttaagttattcataaagcaaattaataaatctgatgaatatgttaaccttcagcgacatcatcggtgaaaacctataaatgaagaaggaaagcaaaaaaatgaagaccattctacctgcagtattgtttgccgctttcgctaccacttccgcctgggcggcagaaagcgtccagccactggaaaaaatcgcgccttatccacaagctgaaaaagggatgaagcgtcaggtgattcagttaaccccgcaagaagatgaatctaccctgaaagtagaactgttaatcggtcagacgctggaagtcgattgcaatttgcatcgtctcggcgggaagctggaaagcaaaacgctggaaggctggggctatgattattatgtctttgataaagttagctcgccggtttccacgatgatggcctgcccggatggcaagaaagagaagaaatttgtcaccgcgtatctgggcgatgctggaatgctgcgttacaacagcaagctgccgatcgtggtgtatacgccagacaatgtagatgtgaagtaccgcgtctggaaggcggaagagaaaattgacaacgcggtagttcgctaaaatgctgtgaagtgcggcaccccgtaggccgaataaggcggtcacgccgcatccgacatctaacgcccgagccggtgcctgatgcgacgctggcgcgtcttatcagcatacgccacatccggcataccatgccggatgtggcacatcattacaacgcaatatccgccacttctttttgaacgggttgcggtttcaactgcggttttggcgtactatctgctgcctgcggcttgtcgtatttcagccccagcacttcgctggtgtactgcaactcgcgttctgttgccgctacatcaccgttcagcttgcgtccataagacggaacgatcgctttcaacgtagcctgccattgcgggctggaaacgcgatcgccaaatactttttccagcagatccaacataatcggcgcggcggttgacgcccctggcgatgcccccagcagcgcggcaatggtcccttgctggtcactgaccacttcagtacccagacgcagtacgccacctttctcggcatcacgcttgataatctgcacgcgctgccccgcttgccacaaacgccagtcctctttttttgcctgcggatagtactctttcaacgcttcaaaacgatcctcttcactcaacatcacctgactcaccagatatttcaccagatcgaaattatccagcccgacgtgcatcatcggcatcacgttagaggtggtggtggaactcatcagatcccacaatgaaccgtttttgaggaatttggttgagaaggtggcaaatggcccaaacagcactacgcgtttaccgtccagaacgcgggtatcgatatgcggaaccgacatcggtggtgcgccaacggatgctttaccgtaaaccttcgccagatggtgattaaccacgtccgggttttccgaaacaaggaactgtccgcccaccgggaaaccggcgtagtctttcgcttccggaatccccgattcctgtaatagcttcagcgccgcaccgcccgcgccgataaagacaaatttggcgcggatgttctgtgcagtgccgtttttcagatcggcaacggtaacggtccaggtgttatcgtcattacgctttagggcgcggacttcgctgctgagttgcagcgagaagttagatttcttctgtaaggaagcaattaactggcgggtgatctcgccatagttcacatcagtgcccatttctgtgcgtgttgccgctactttctgttgtggatcgcgcccttccatcactaacggtgcccactctttgatctgcgcgtgatcttcagagtaacgcataccgcgaaacagcgagctttgttgcaacgcggcgtaacgggcgcgcaggaaattaacgttatcctcgccccagacaaagctcatatgcggaacggtattgataaatgaacgcggagtacgcagcacgccgcgctcaacctggtgcgcccagaactggcgggaaatctgaaatgcttcgttaatggcgactgctttttcaatactgatgctgccatcggcgttttgcggggtgtagttcagttccatcagtgcagaatgcccggttccggcgttattccagccgttcgaactctcctgcgcgacaccctccaggcgctccaccatggtcatcgaccattcaggctccagctcgcgtaaataggtccccaacgtggcgctcataatgccgccgccaatcaacagtacatcagtttcctgctcctcggacgctttcgcttttgccgccatcgaaacggcattaagccccacggccatcgagaagagcatggcagtcacttttttcatcttgttaatgccttacttttagtcgctttattgcaggtgagatttgcgcggcatcaacggtaacacttaagtaacaacatttaaataatgtttataaattatattctaattttagaaacattataatttcgttgattaattatagggttattagaaatgaagggatttttagcatattgacctgacggcagcagtccgccaggtcagcgtcgtaatattatgccgtccgggcaacggcatcacgcgaagcggcatcgcgctcttcgcccgtcagctcgctaagttgcccattgcgcatttccagcaggcggtcggcgtggataaagtaatgatcatcatgactgatagcgaaaatagttttacccatctcctgcatcagcggcagcaacacctgataaaactcacgacggaagtgtggatcctgatccgccgcccattcatccagcaggataatatcgcgttcttctgccagcgccagcaacagcgccacgcgttttttctgcccttttgataacttcaggttaacaatacgcccgttgcttaactcaagcttatgagccattttcagctgcgccagccacttctcaaccagttgcgggttagcgggtttaccctccggccccagcagttgatcaaacagccagacatcggtaaacactgccgaaaacagtttgcgataatcttccggttgttcgtcactgacaggtttgccatccagcaagatttcgccgctttgtggctggtacaagcccgtcagcaacatcgccagcgtcgattttccactaccgttgccaccaatcagaaacagcagctcgccacgtttaatggtgaggttaatcggcccaacggaaaacgcgttatcctgatagctaaacgtcacgttacgcagctccagcgtttgccagttgggaaaagcctgcgggcgcggaaactcagctttgaaaggcgcgagcgcgaatttgttcagcttgttaaacgccacctgcgccgtcagcagcgtcggcaatgcgccaaccgccgaaagcagcggcgtacgcaggaataacagcgtcaacgaataggtcgcagcaacgttggtatcagcccaaccgagactgttcgccatccagaacaccaggccgatagcgcccagcatcatgatgtttgaccagttcacggcgctaagatggaaggtgtctgcgcgaataatatgatggcgatactcttgcgcatcggggatgtagaggttgttaaacacatactcggcgcgttcccggttcagagtcagctctttgcgcccttcgagtacggtttgaaaatccgtgtacagcttgtcttcggtttcacgcagggtcgccatatgtttgtacacccgcgccaccagtacaaaaccaccccagatggtgatcgccatccagatagccgttaccagcaacattttgcccgacagcatccacagatacgccgcggaaccgatagtgagaatgctcccctgcaccagttccggaagacgcacaaaagcaatggtgatattgcgcacatcgctggttaatcccgccagcaacgaggcgctaccgagttgttcaatgcgctcgacgtgggtatccagaatccgcttgataaattcactacgcagtcggtaaacgaagtgatgccccaaagtggtgagcgccagttgcgatccgagagtgactgccatcaacagcagtaataatccaagaaactccggcaacaccagcagactggtatccgccgtttcgataaggcgctgattgataaaagcaattaagccaatgcctaatgccgcactggcgaggcttagcgccatcacactgataaatggccagcgatactgccgccagacaagtacaagaagttccatgcagaaaacccggacaatgaattacagcccgcagtttaaacatcttcgcgcgcacagcaataataattcttatttttattcttttttacctgcctgacggaatgtcaggttgtagcggcagtcggtggtgagtggatgaaaccccgctttcaacggttgaataccgtgataaaacagccgcgattcaccgccccataccaccacatcgccatgttccaacaacaaacgtttgagcggatcattacgtttcaggccaccaaattgaaaaattgcgggtaagcccagagaaacagaaacaattggcgcgcgcagatccggttcgtctttatcctgatgcagcgacagtttcgcgccaggagcgtagcggttgataagacaagcatctggctggaaatctggatagcccgccgccgtagccgcacgttgacataaattatgaaaactctgtggcatggcgggccacggtttatttgtttgcggatcaatgggcgaatagagataaccttgccgatggctcgtccagcccagatgcccacagttggtcatcgccaccgacatggtatatcccccgggggtgaccatctggcgaaacggcgactggctggcaacgttattaatatcgcggatcagttgctccgcagcgttaaaagcaaaacggtgcaaaattaccgctccagccgccagtggctcttgccacggttcagcatcggcaaacagatccaacattacctctcctcattttcagcttcgcggcgcagcagttgcgctttacgcgacacgccccagcggtaaccggaaagtgtgccatcaccacggaccacccgatgacagggtattatgatagccagcttgttggcggcacaggcgctggcaacggcccgtaccgctttcggtttgccgatggcgttagccagttgctgataactgacggtttcaccgcaaggtatcgtgcgcagtgcctgccagacttgttgctgaaaagcagtgccgcgaatgtccagcggtaacgtcagcggcgtatcgcgttgattgaggctggcgatcacttcacgcacatgttgctgaaacatcagatcggcaggcgcgttgtcggcagcgggaaacatctgctgcaactcgctgattagtgtcgcgtcatcatcgcccagcaatatcgcgcaaatcccccgctcgctttctgccaccaggcaacgacccagctcacaatcagccagcgcgtaacgcaccgccagattttcgccaccgtgacggaattgtttagccgtcatgcccagcgtttcgtcagctttgcgatagtaactgctgctgtcggggaatccggcgttaagaatagacgtcgtcacgctctcccctttcgccagcgattcgcgcaaacggcgagcgcgccaggcctgttgccaggctttaggcgtcattccggtagtcgctttaaacaaccgatgtagatgaaatggactcatcgccacctggtcggctaaggcttccagcgttacaggcgtttcctgttccagcagtcgacacgcgtgggtgattttatccaaccgatgttgctgggcattggctttttctggctgacaacgtttgcaggggtgaaagccagcggcgagtgcctcgctggcatttgcgtagaaggagacgttttcccgcaaagcatgtctggcgcggcaagacggacggcaaaagatgcctgtggtacgcacggcgaaaacgaattcgccgtcggcattcgggtcgcgggctaagacagattgccagcgttgatcgtcagttaagcatgtggcttttttcataatcagctccctggttaaggatagcctttagtctgcccggtcaccatcacgcaaaaaccaacaatcttgcgctttaatttttttcgctgacaaggaagcttttaaactgtggtgacatccaggttttaaagctatcgccttctttggtgatcatataaaccgccagcccttcccggcgaacaacctctttggctttcttcggcccgagtaccatcaagccagtatcccaggcatcggcttccagcgccgtcggagcaatcaccgtcacggataccagattgtgttcgatgggacgcccggtttgcggatcgataacatgggaaagacgtttgccgtccagttcgtaatagttacggtagctgccagaggtgctaatcccatgaccgttgatatccaccacagcctgaaccgcgttttctttatcggttggtttttgaatcgctacccgccacggctggccttcaccgttcataccacggctgttcagcgcgccgcccaccgacaccagatagcgggaaatcccttcctgctccatcaagcgtgccaggtgatccgccgcataaccttcaccgacggtggagagatcgacatataaatccggcaggtctttttgcagatattgctgatgcgactgattgatgaccgtcaggtgctgtaagccggttttggctttcatcgcatcgatctgttcctggctcggaatttgaaccggctgttgttccgggccaaagccccacagattcaccagcggcccgacggttatatccatcgcaccatcggtccttgcgccaatgcgcagcgaggtggtgacgatatcggccatcgcttcacttaccggccacggcgacaaactttgcgagtcgttaaagcgcatcagcgcggaatcttttttataggtcgaaagcagctgatcgtcggcatccagctgggtctgaatcttttctttaagttcggcactgcgtttggcgtcaatgcccgggatgctggcacgccagaaggtacccatggttttgccttcaagaacggtaacttcagtagcgtgggttttggcgggttgtggtttttgatcgcaaccaacaaagaagagcgcggcagccagcagtgccacgcgggtaaagcttatttccatacgtgattatcctcatgcgaacggtcgcaagagtacaccaaaaaactgtgtttgtacgctgaaaacaatgaaaaaagggcccgcaggccctttgttcgagatcaatcgagattagaactggtaaaccaggccaagagctacgatgttatcagtgttgatgccagcgtcacgagtgaactggttgtcgtccagcaggttgattttgtagtcaacgtaggtggacatgtttttgttgaagtagtaggtcgcaccaacatcaacatatttcaggatatcttcgtcgtcgtagttacgagtaccgatggtgcccaggtttttacctttagactgcaggtatgctacagacgggcgcagaccgaagtcgaactggtactgagcaacagcttcgaagttctgtgctttgttcgcccaacccagggaacctacgcgagttgcgttgtaggtctgggtgtactgagcagccaggtagatgttgttagcatcgtatttcagaccaccagtgtaggtttcagcacggtcgccgttaccgatgtaagcagcggtgttctgagcatcagtacgtttggagctggaaactgcagcaccgataccgaagccttcgtaatcataagtgatagaaccgccaacgccgtcgccgttctgacgcagagcatcgcgaccattgttggtcatgccttcgcctctagcgctaccgtttttgccctggtactgaacagcaaagttcaggccgtcaaccagaccgaagaagtcagtgttacggtaggtcgcaaagccgttaccacgctgctgcatgaagttgtcagaaccgtaggtgtcaccaccgaattctggcagtacgtcggtccaggaagttacgtcgtaaacaacgccgtagttacgaccgtagtcgaaagaacctacatcctggaatttcagacctgcgaatgccacacgggtccaggagttgttttcgttttcagcgctgttgccctggatctgatattcccactggccgtaaccggtcagctggtcagtaacctgagtttcacctttgaagccaagacgcatgtaggtctggtcgccatctacatctttgttgtcagagaaatagtgcaggccgtctactttaccgtacagatctaatttgttgccgtctttgttgtaaacttcagcagcgtttgctgcgcctgctaccagcagagctgggaccaggagggacagtactttaactttcatgttattaaccctctgttatatgcctttatttgcttttttatgccactgcatactgattaaccctcattaatcagtcggcaagtccattctccccaaaaatgcagaataatccaacacgaatatgatactaaaacttttaagatgtttcatttgtcgctatagatgtttcaaaatgtaaatagaagggaactttttaagattattgcggaatggtgaaataagcacctaacatcaagcaataataattcaaggttaaaatcaataacttattcttaagtatttgacagcactgaatgtcaaaacaaaaccttcactcgcaactagaataactcccgctatcatcattaactttatttattaccgtcattcatttctgaatgtctgtttacccctatttcaaccggatgcctcgcatccggttttttttacccttctttacacacttttcattattctgtgctaccacagaaaaactataacgcttgttaactatttcacaaataattaacatcagcataatttccagcaatcttcgtttatttgcaattaatttcgttgggctttttgtaggttatttgtacagcaaaatggcgcttgtacatctattttccccaatgcaggatgataaatatcacgggagaatagagaatcatcaatcaggtaagagtctggaatttcacacagtaccctttatactgccctatcacttcgcgaagttttaacaggtcataaacacgaatgcgtcagaaagagacaacggccacgacccgcttttcactcctaccggggagcattacccgcttctttttactgttgatcattgtgttactggtgacgatgggtgtaatggtacaaagcgccgttaacgcctggctgaaagataaaagttaccagattgtcgacattacccacgctatccaaaagcgcgtcgatacctggcgttacgtgacctggcagatctacgacaacattgccgcgacgacctccccctcctccggcgaaggtttacaagagacgcgcctgaaacaggatgtctactatctggaaaaaccgcgccgcaaaacggaagcgttaatctttggctctcacgacaactcaacgcttgagatgactcaacggatgtccacctatctggacacattgtggggcgcagaaaatgtaccgtggtcgatgtattacctgaatggtcaggataacagtctggtgctgatctcaaccctgcccctcaaagatctcacctccggatttaaagaatcgaccgtcagtgacattgttgattcacgtcgtgcagaaatgttgcaacaggccaacgccctcgatgaacgcgaaagtttttctaacatgcgccgcctggcctggcagaacggtcattactttaccttgcgtaccacgttcaaccagccgggacatctggcaacggtcgtggcttttgatctgccgattaatgatttgatcccaccgggtatgccgctggacagtttccgccttgagccagacgcgacggcaacgggaaacaatgataatgagaaagaagggacggatagcgtcagtatccactttaacagtacgaagattgaaatctcctcggcactcaactctaccgatatgcgcctggtctggcaggttccttatggcaccttattgctggatacgttgcaaaacattctgctgccactgctgctgaacatcggtttgctggcgctggcgttatttggctataccacattccgccatttctccagccgcagtacagaaagtctacccagcacggcggtcaataacgaattgcgcattttacgggcaattaatgaagagatagtctcactgctgccgctcggcctgctggttcacgatcaggaatcgaaccgcactgtcataagtaacaaaattgccgatcatttgctgccgcatttgaatctgcaaaacatcaccaccatggcggaacagcatcaggggattattcaggcgacgatcaataacgagctgtatgagatccgcatgttccgcagccaggtcgcgccgcgcacacaaattttcattattcgcgatcaggatcgcgaagtgctggtaaacaagaaactcaagcaggcgcagcgtctgtatgagaaaaaccagcagggccggatgacctttatgaaaaacattggcgatgcgctgaaagaacctgcacagtccctggcggagagcgcggctaaactcaacgccccggaaagcaaacaactggcgaatcaggcagatgtgctggtgcggctggtcgatgaaatacagttagcgaacatgcttgcggatgatagctggaaaagtgagacggtgctgttctccgtgcaggatttaattgatgaagttgtgccttcagtgttgcctgccatcaagcgtaaaggtctgcaactgctgattaacaatcatctgaaagcacacgatatgcgccgcggcgatcgcgatgccttacgacgtattttgctgctactgatgcaatatgccgtgacctcaacgcaattgggaaaaatcacccttgaggttgatcaggatgagtcctccgaagaccgcctgacgttccgcattctggacacgggagaaggcgtaagtattcatgaaatggataatttgcacttcccgtttatcaaccagacccaaaacgatcgctatggcaaggcggacccgctggcattctggctgagcgatcaactggcacgtaaactgggcggtcatttaaacatcaaaacgcgggatgggcttggtacacgctactctgtgcatatcaaaatgctcgcagctgacccggaagttgaagaggaagaagagcgtttactggatgatgtctgcgtaatggtggatgttacttcggcagaaattcggaatattgtcactcgccagttagaaaattggggtgcaacctgtatcacacccgatgaaagattaattagtcaagattatgatatctttttaacggataatccgtctaatcttactgcctctggcttgcttttaagcgatgatgagtctggcgtacgggaaattgggcctggtcaattgtgcgtcaacttcaatatgagcaacgctatgcaggaagcggtcttacaattaattgaagtgcaactggcgcaggaagaggtgacagaatcgcctctgggcggagatgaaaatgcgcaactccatgccagcggctattatgcgctctttgtagacacagtaccggatgatgttaagaggctgtatactgaagcagcaaccagtgactttgctgcgttagcccaaacggctcatcgtcttaaaggcgtatttgccatgctaaatctggtacccggcaagcagttatgtgaaacgctggaacatctgattcgtgagaaggatgttccaggaatagaaaaatacatcagcgacattgacagttatgtcaagagcttgctgtagcaaggtagcctattacatgaacaatatgaacgtaattattgccgatgaccatccgatagtcttgttcggtattcgcaaatcacttgagcaaattgagtgggtgaatgttgtcggcgaatttgaagactctacagcactgatcaacaacctgccgaaactggatgcgcatgtgttgattaccgatctctccatgcctggcgataagtacggcgatggcattaccttaatcaagtacatcaagcgccatttcccaagcctgtcgatcattgttctgaccatgaacaacaacccggcgattcttagtgcggtattggatctggatatcgaagggatcgtgctgaaacaaggtgcaccgaccgatctgccgaaagctctcgccgcgctgcagaaagggaagaaatttaccccggaaagcgtttctcgcctgttggaaaaaatcagtgctggtggttacggtgacaagcgtctctcgccaaaagagagtgaagttctgcgcctgtttgcggaaggcttcctggtgaccgagatcgctaaaaagctgaaccgcagtattaaaaccatcagtagccagaagaaatctgcgatgatgaagctgggtgtcgagaacgatatcgccctgctgaattatctctcttctgtgaccttaagtccggcagataaagactaatcatctgtaggccagataagacgcgttagtgtcttatctggcatttgcaccgattgccggatgcagcgtaaacgccttatccggcctacgattcccattatttcaacagattacattaaagtaggccagataagacgcgtcagcgtcgcatctggcatttgcactgaatgccagatgcggcataaacaccttatccgtcctacgattcccgcgatttcctgaccctctcggcatataccgtcagcgtctgttttatcacatccagcgttaccggcttcgacaggcagctgtccataccggactccagacaccgctgcttctcttcagccaacgcattagcagttactccgattaccggcaacgtcagtcccaactgacgaatgcgttgcgtcaagcggtaaccatccatatttggcatgttgacgtcgctaagcacgatatcaatatgattcttgctaagtacattaagcgcatcgacaccatcattcgcggttttacattgatagcccaacgatcccaactgatctgccagcagacgtcggttaatcggatgatcatccacgaccagaatcatcatatcgtcattatcgctgaccgctttgtccgtcgacggcagagcgttagcaggatcgtcgctctccatctcgatcaaataaatacgcgccaacaatgccggtagctcatgcggggcagccacactgtgtacccactcccctggcgctttctccagcggaataccaatatggcgacgacagaaggtcactaccgctctaccctgccattttttactcactacctcgtcagtaattaacacatcttcgggagtcggttcctgcccttcgtatgttgtaacgacgatgccgctgcgctgcaaactggtttccaggaactgacagagcgacgcattgcggaccgccagccagcagcgtttaccactcaacccttccacgccttttttctgcgggtactgagcgccgtacaacggaatacgcacggtaaactggctgcccattcccggttctgaatctaccgagatatcgccgtccatcatgctgatcagtttttcacaaatcgccagacccagaccggtcccctggaagtttcgctgtacgcccgttccgacctggaagaagggatcaaacaagcgcaccacttctttcgccggaatccccacgccggtatcgcgaacacggatagagagataatcgccatcagcgcggacatgcaaaactatacagccggtatcggtgaattttatggcgttactcaacaggttggagatgacctgctgtaaacgcatcgggtcgccatttaaggccactggcacatccggttcaataaagcagtacaagcctaactgcttgcgtaccaccagcggtaaatagttggcggtgatgtggttcatcacttcacgcggtgaaaactcacgcggttcgatcttcaactgttccgattcaatcttcgagaaatcgagaatatcgctgataattttcaacaacaggctggaagagttgttcattgccgtcaccagccgatcgacgcctttcggtaactctttggtttgcaacagatccaggttaccgataatgccatacagcggcgttcgcagctcatgactgacggtggcaaggaacatcgattttgactggctcgcctgttccgctgcttgtgccatctcctgcaacgactcttccatcttcacgcgcgaagaaacatccaccagcacacaaatggccacgttttcattacgatagcgcgaatggacgaagctgatttgcagattggtattgttgctggtcaggacatcaacaaaattgacctgctgcccacagataatttgcgtcagtcgttggcggtcctcatgcgtaagcatattgagataggtatgcgccagttcgttacttaaaatattgacgccatcagcggtacgcaaaatgcagatacccactggcgcggaggcgacaatcttgcgattgaactgctcatgttcttccagtcgcagggcgtcgctttccgccggaatgaaaatacgtcgctcgtacatccgcgcgagagtaaacaatgcagctccggcaagcacattcagcaaaattgcgttaaggatcaacatgcgaatgcgttccagcaccttatcaaccggcaccgaatacacgatgcttagcgatgagggtggcagatttttcttcagcaccagctcccggaacccttccgtatagccaaaccaggagcgttcctgcatccagcgaggatcgcccttaattttactttctggtccggtaagcgaaatcagggtatgaccattttcatcaagaatggtaacccccatcggcaacgtacccggtaagaaaaagttctccatccggatggtctgctcgacacccaaaagcgcctgcaaccggttcgccagataaactggcgtcaacgcgtaaaaatacccgacgccagggcgcggaccttcgctgatccagtagaggttactgccgctatcatcttgtggtgcatttcgatatttattgatgcgttcatgcaaagctttcaacgcggtatcgcgttccactggcatatcacgcagaccgaaattggccatgcagaggttatcactgccgattaaaaatacccggttgagatcgtaagccgcagaaaaattatcgcgccagtagcgcataaaccacgccaatgactccagagaacctcgccaggtgttactcattgcggaacaatcggagtcggcaaacagcggttcaaacgcaggcacatccgcctgcgtttctcgtccacgcggggaaagcacaccgttttctgccgataagcgattttcggcgatgtacttcagctctttcatcacatcagaggtgcgttgaataaagcgctgagcctgatcggaactcagattaaattcctgacgaatttccgattctcgctgatgtaacgcattaacgatgtaaaaaacggatgaaaaagcaatcaacagccagagcactaacgccaatgctctgaacatgtagcgcgaggctttcagggttgtacgaaaagaagcaaggtatttcaaaggggcgaagctccgcctcaggtgaccgatggagtgtggttaaggtagcggtaaaagcgtgttaccgcaatgttctgtcaccattgcaataatgcgtatcgcttagaaaccattgccttaaccaggaaagccggagtagatggacagttctcagtacgaaaaataagaaatgaccaatctgccgacgcttgttaatggttatatcctggcgtcggcagatcgcccagcagtcttatctgaaaaaagagagagccaggttgtgtgaagggatggatcaccagtcaaaacttttcaccagcgtcagctcgccagcattacgcatcggtacaataaatgtttcctgtttctcattgaccgatccttcatcggtgatcagcgtcagttgggcggtcgtcaattccgtttcgctgcgcccaccatagtagttgatatacacctgatagcgcccgtgaactggtgctggcatggcgaaaatctcgggtccgtaccccgtcgtgacatccatatccagtgcaccactgtttttcagcacggtgttaccgtaccaggcgtgttcgccatcgggcgtgacaacatggagatcgagatcggtattgtccgtatcccacgagagaaccagccgtaaacgtgcacgaatcgttcctgtacccggcgttgagtaaaactgcattttttgtcggctttgcccatccgggctgatgacctgcacgctgttgctgccttcagtgaaaatataagggcgtgcaaatgaaccatcggattcaactctctgcggcatactggcaccgttgaccaccagccggccctgctgaactttacccgccgcagcataattctttattttgccgcggatctgcgctgagatattttgatcatctgccatgttgacggacgacgccgggtaattgatcgattgtgaaaaactggcatcttcgccctctgccggatgccagccagagagcggtgcgtcaatctcgacttcctgcacaccttcactgtgagcgacaggcgaaagtgccaccagtaacaacggaagaaaaatctttcgcatagcattagtccattaataattgtcgggtcagcgtttcgatatagttctcatcaagcccggtgggataaccatcaaaggccaggtgcagatactcatgggttaaatccagccgatcctgaagcgtaaagaagttacgaataaacagccgtttctgctgccgatcggtataggggaaacctgagactaaacgacagaccgcaaacacgtctggttcgttgtaccccgtctcgccttgtaatatacgccgccactgcggcatttttttcgccagccaggctttcgctttgggtaataactggcaggttgagcgtggagctccccagcggctaaggctgttgtcgggataagcaaacgcgagtatctggtcgtaacgctccccctgccccgcctgggccgtggcttgccgccaggaaagtgtcccttcggtagcgcgactgccatgataatgaaccggatcgcctgcatagatgagatcctgcgtccaggcggtcatcgttcgcgcccccgtggtcgctggcgaagcagaaacacgctgcgtggcgctgctgtcggggatggtcaggcaatcgccttcccgattggcgttttgctgtaaaaaagtgcgaatcgccacggtcatggctttcgctgcctcagggggcgtacttttcgcctcgcgatccagaactctggcaacgtactcttcacgatcgagatgcgactgcaatttcagtttgcccttttcgctcagtaaggtcgtctcaccgtggctgacaaacgtaatgtggttaccattggtaaacgtcacacgatagcgcccattaagtacgccgggttttactgccgtcgtactcttttccgctgtgattttcttcagcggatagcgggcaaacagctccacctctacacattgcccactggcaacctgcgtcggcactggcaaaacccgattaagcaccgtcgcataacgggttagtaccgttttgctggtgccactgccagtagcccacagcggtgtaccatcggttaaccagccggcaaaaccaccctgacggatttcctgtttatcatcggcaaaccagctccaggttttcacccgtacccgactaccgagcatggatgcgactccgattttcgcctcgtccagcaccacatccagtaagacttcctgagctttgttttgcgcaggtaacgtcgctaatgaatcaagcagcgatttaaccgttaccgaggtttctggcttcagcgtagtaagagacgctaaccacgcaggtgcctgacgctgttgccagtattgcccccacacatctgcgccaatatgcaaccgctgcggcgcaaaatagagcccacaggaacgtaccagcgcggtatcgcgcgttatgctctccccagcctgacaacaataaacctcttccggggagtttccgcgacactggtagggctgctccggttgatgggtatcctccagccaggcgtaaacatacagtttccacaaactccctaacggcgtggtgagcgagtcaggtaatgtcgaggctttggtcacgcctgatgacgacagctgatacagttgatcgtgctgcgcaccgcgcagcaccagttgtaacggcgtctcctccgcaagcgttggcagagtaaccaacgccaatagccagacgattctgcgccagttcacttatttcacctgcatcccggtccattcactccctgccgcaacactttgctgcgcaggtgcataggaacgcacataacgagcaggaggcagaacgaattgccctttttgcgagaagcgcagcaaatggcggaaagtgaccgttcccgtcagttctttcaccggcaccatataggccagttcgcccatttcattacgcgctttttccagcaattgcccctgctgtttcgcggcgttgggtttattgactgaaatgccccatgttgtgcgctcaacgtcggctcccggcgggagcggtacttccacctgaccatagcgcagaactgcatcctgctcgctggtaagcgtaatttcatcgagatacagcgcatcgctgtcaatctcattgctggtcaccggttgcagaataaagctcatctcttcttcaccagggataagccgatacaactggcgttcaacggtcaccggaatgttactttgttgagccatttttgccggctcacgccagcggacctgcacattttgcggcgataattcgtcaccaaaagagagaatgtccggcacgccctgaccaacccaacgccagtcttcgccccctccagttaacttatgtttagcccatgcgcccgcaggcgcaggcaaaacaactggaggcatcgtcgccatatatttcgccagccagttcatggccagcgcgcgctcaatagtggattgctcagcggtcaaaccacttaaaatagcagccgcctgggtagcgtcgccaccgctattaagcagcacaaccgtgtgcgccagcggctgattgctgtttgccgctttatcccacgcatattgctgaacctgtggcatcaccgtggacttcaactgcgctttttcagcaacgtcatggttaagacgtttgccaccgcatctgccagtggagattccggtgtatcgaggatcaggctgtcattgatatcgcgggtgtcttcctcagagaaatcttcatctttagttccgcgccgggcgatagcttcatccaaccctttcaacaacgttttgcacggcagattcatctcctgtgcccacgccagcaccagcgcccgatgcaataacggcatgttatctgcctgctcggcataactgtcgagcatatgctgccagtattccggttgttgcgttacgccgagcgcctggctggcctgccagtcggcgtaccatgcccatgccgtaaggaaggcgtcaccattgccatcttcaccccaccaggtaaagcgcgctccgggccccgccagttgcatcagccgcagacggttatcctgaatcatctgacgaatgtcgttagcggcggcactttgatgatcggcaagcgaacgccaggcgagactgagcgggatcagacggctaccggtgttgatcaccccaccccacggttcatcgactaacgcatcaagattgttgcggaaaatctcctgcggcgtttcactactttgtagccggatattgctcgcctgctcgggcaacatcagcgcgttctcgccaccgccgagcatgacatttttctgctgttcaacgggccagctgttgtccacaaaagacagttttgtgctaatgctgtcctgcacttgcccattttgttgcagttctgcacttaacaagccagattgctgaatattctgcgtcagcgaaatataattcgcccctttgtgcagcgtcagcgtctggcgcatctcagcgcctgcaaatttcgtcaccagcgccaccggttcgttatcctgctgactgaagataaacagtcctgctgccggtttgtcgcctatgcgatacaccgttggcatactccacttcatgtagagatttttttccgaacgcagataagcacgcccctgcccgaccagcccgtcgccgttcatcccacgcgcggtgatacgccagcgggttaacgaatcaggcatcaggaacgtgaaatacgctttgccttgtttatcggttgtgagtgacggcatccatgccgcggtatccacctcttcacgccgtggacgttcaagcatttttactcgccgctcgctgcggttagtcgcgccaggcgcaaccggctcgctggagagcgcctggtcgtagctgataaacgacagactggagctggtacgcacattgttacgccccagcggatagaaaaatttgccgatattcggcgcgatttctggttgcagcgcgtagatcatttcatcgaccacgcctaccgttagctgcgcagaaacaggtttacctttcagcgacgaggttaattcgacattgaccagttcaccaggctggtaatgggttttgtccgttttcacccggatatcaagctgaggaacggcaactttgatcccggcgttctgaaaactgtactgaccattacgggtatacagcaccgaaaaagtgatgttaggcgcaaaggaattgctcactggaacccgggcttcatactgggtatcgtttaaacgttgtaacgtcagccagtttgccggatgcgaaagcagcgactgctgttccacgcgatcgcgttccagcgtcaataatgcttcatcaattggctccggaaaagtaatcagcatcttcgcggtttcgcctggctggtacagcgttttatccgccacgatatctaccgtaccagtatgcgccgtgctgcccttaccgctgacggcatgacttaacccagcgagaattaagccgtctttatcgcgtaatgtcagattgtagttgccaggtttagcgaaattgacggtaaaggatttgccgcctgacggtagctctccgctatggctcgtgtggtcttcgagacgcaaccattcatacgtaacaggaacctgttttgaagattccagcgcggcataacggaacacaaccgactcgccgctattactgtattgtgcggcagtacttaatgagtaatgcgccagaccgcgttcaatgaggatctctttggtggtggtgacacgatacgccgcgccgtcactggcggagacggttaacaaataacggctcggtttatcggcggcggggagatttaacgccacatgaccgctggcgtcggacaccgtttcgctgccttccagcgacacggggaaacgtccggcataacgcaaatcgttaccgaccattgataattgctgagcgcgcaaacttaactgcacgcgggcattttttaccggctcgccatccgggtagagcagttgcagtttgccgctgaccgcttcgccagttttgaactcttttttgtcgagagctaaaccaatctcgaaatgtggcttgatgtagtttgccacgcgaaaactgctgctatagacctgattgcggtaagcaagacgtaactcataacctccggcaacggcattttctggcaggcggaaacttccctgcccgccattgcgcgcatccagcgtgacatcgacggtttgcaacagactgccgttggcgtccagcaccgaaagcttcgccggggcgctgacgatgggggatgaatgcaacggatcgtggaactcgcgccccatcactttaacatcgacacgatcgcctgcgcgatatagcgggcgatcagtaaaaatatacaagcgggtggtgtagatttcactttcgtagaagaagttctcggagacaaaaacgccgccttcagcatccttacccagaatgtatgaacgttctggcgatatatgttgtaactgcaaggtaccgctgtcatcggtcacaccgcgggtcatcacgccaagaccgtcagtccacaagatctctgagccgggcttcgcttcaccctgttttttacccgcggtccacaccagaagctcgttgcctgacactttgctaagcgccacggtatcggaaacaaacaccaccgtcgtcgcccgatacccaccaaccatcgcctcgacgaggtacagtcccggctcttgttggccgagaggaatataaatgttacccggctgcggcgagatgaaattgctggatgcgccttccagttttaccccttgctgcggctcgaccggtttagcctgccatagtggataacggaactgttccaccaagggatattttttcagcggggaaaactggttgttctgtacataacgggaaggtttaataatggcattgccgagatgtaattcgggtaatgcctgagtcacattctgccgtgactgagaagagaaagtacgctgcattacgcggcgagatttgccgtaccagttatcccacagccaggtcagcgtattgttcagcccgtcgcccagatattgcggttgcaccacaatgcgatgcaggtttttctgctggcgcaaaaatgccatcgggtcaggaatacgatacaggcgaacgtccacgccgccgtactcttccatctgatagcgccgataatcacgccccggcgcttccagtcgcactttcgcctcttcactgctgctaaaactgctgtcagcaagcaaaaagaatgttcccccggcgggcggcgcatagttactggaaggaagcgaatcatcagcattagcaagccctgttcccacaagagacagggacaagcacgctgctatcgcgccagaaaatttaaacgataaatgccaatgaaattgggattggaatcgttgggtatccatcgggtgtccttccatgtcataagtcgttgcagactgactgcgcgcattccgttgtcagttttcgtggcgcttccggtgtggtagatgacgtaacgccccatccagaccattaagtgctgggcatcgccctgatcgaaaaaaatcatatcgccaggcagcgcctggtttatgtcctggccaataaactggctgttgtactgaatcaaattaatcgcggtcacgtaggggccggttttcccgttcccctgattccagttttgcgccagttgacgctgtccaggtgttagcgtcatctctggcggcaaatactggctagagaaaccgttactttttagccatttactatcgtgaactttcagcgtctcgttcgccgcaaatcgcaccaggcccgcacaatcctgctgataccagcgtggacttggcccctggcggagctgttcttgtgcaatgcgtacaaaccaggcgcgaaacagcccggattgttcgacattcagcatttcgctatgggcaacaacacaacacagccagcaaatcagcgccagcagcccgtgcctcatagcggctgccaggttatgggtagccactgccaggcggcaccgggttccatctgggccagcttcatgacataacgcggttgttgagataaagcgtccagcttcggcattaataaagtttgtgcggcgttataaaaaaccggttcgagattcttcggcagactggtcaacgtttcgttacgcagcagtttcgccacgccttgtggattgatatagagcggaacgatgccatcagtgggtattacatccaccattgccgggcggtttttattcagtgtttgcagggcgttattaaccagcgtgtcatcgagggagaaaagcagcgttttgttttgcatcgccagcgacacgcggaaaaaataatccgacattaattgatcgggttgcgccgcctgcgctttcggatactgaccgtatcgggaactcacttcgcgacgccagatttgcgcttcgccctgctgagtctggcttatcggcaaaacaccttctggcgctttgctttcgtgcgcaccaatattttgcgtaaacagtttccctggcaattgcgcctgttcggcagtgccatcaaactgaccgacaaacagcggggtttgcaattttgagtcttcataccagcacagccccgcggcaccgtctaacgccccattcagcttgtcgttttcctggctgatgtgcgaaagcatctcttcggcaataccgtgtgaatacggcaccaccacacagaagctggccccggcaggcatactgttccagaccggcgtaaaatcgaaactggtatctacgctggcggattcatcatttaacgccacaaaactgtgccagccgtcgttacccatttcgaagcgtacgccagcaaaagaaggcattaaccgctggtagccaaaacccagcaacctggcgctgaccacgatgcgctggcgtactggcgttttttcagcagcacgctcttccaggccaaagcttgcttgccagcgttttttgccgctcaacaaatcacctgcgatcgccgtggcttcggtatcctgctgatcatctttaaacagcatatccgtgctggaaaacactagcatcttgtcctgatatgtcgcgaacatcagagcgttattgccgttatagcgcaactgataaacaggaacagtttcactatttatcttgatgctactgatttccgttttgcttaactggctgtcgctggtagcggcaaacaacaatggctccagcagtttgcttaaaccactgcgctggatcagcaccatataatgtgaaagatggccttgtttatcgtgccacagcgctgcctgcgcgggctgatctaagagtgacgaaaagagcttatctttcagcgtgagatcgtgttcatagacaatacgacgaatgctgccttcaatgcccagacgatcggcatgattctgataatagaaaacgaaatcttcgctcagaacatcgtggagaaacggaatggtgaggagatctttgggaagctggctcagagagtcgctgtcgagaaagaggtccggctcattgagatcgatttgcagattgttgtgcaccaccagcggcgacaacgttttttctggcccactgccagcatattgcaacgcccagacgccagcggaaagcagtgctattgcgccaaaacctacaagaccatagaaccgccagcctttcgcctttttttcaccactcattgccacattccttgtgtatagccagccattttttacgggcacagccaaactttaccgtgccctaatacgacaaaagcccagactttgcagcctggacttttcaattcaaacaagggagatagctcccttttggcatgaagaagtaaaattattcttcttctggctcgtcgtcaacgtccacttccggagcgatttcatcgtccccttccgcggcactgccatcgatggtatccagatcttcctcgtcaaccggttcagcaacacgttgcagacccactacgttttcatcttccgcagtacggatgaggatcacgccctgggtgttacggcctacgatgctgatttccgaaacgcgagtacgtaccagcgtaccggcatcggtgatcatcatgatctggtcgcagtcatctacctgtaccgcgccaaccactaaaccattacgttcagtaaccttaatggagataacccctttcgtcgcacgcgacttggttgggtattccgccactgcggtacgtttaccgtaaccgttttgcgttgcggtgaggattgcgccatcgccacgaggcacgatcagagagacgactttatcgccttcacctaagcgaataccgcgaacaccggtggtgttgcagcccatcgcacggacagaagactctttaaagcgcaccactttaccttcagcggagaacagcattacttcgtcttcgccgctggtcaggtcaacgccgatcagctcatcgccgtcaaccagtttgatcgccactttaccggcggtacgcagacggttgaactcggtgaggacagttttcttcacggtaccgttagcggtcgccatgaagactttcacgccttcttcaaactcggtcactggcaggatcgcagtgatacgttcgtcctgctccagcggcagcaggttgacgatcggacgaccgcgcgcgccacgagtggcttccggcaactgataaactttcatcgaatagacgcgaccacggctggagaagcacagaatatggtcgtgagtgttcgccaccagcagtcggtcgataaagtcttcttctttaatacgtgcggcagatttacctttcccgccacgacgctgcgcttcgtattcagaaagcggctgatacttaacgtagccctggtgagagagcgtcactaccacatcttcctgagtgatcagatcttccaggttaatgtctgcgctgttggcggtgatttcagtacgacgtttgtcaccgaactgttcacgaaccagctccagctcttcacggatcacttccatcaaacgatcggcgctaccaagaatacgcaacagttccgcgatctgatccagcagctctttgtattcgtcgagcagtttttcgtgctcaaggccggtcagtttctgcaaacgcagatccagaatcgcctgagcttgctgttcggtcaggtagtacagaccatcacgcacgccgaactctggctccagccattccggacgcgcagcatcgtcgccagcacgttcgagcatcgcggcaacgttgcccagctgccacggattagcaaccagcgcagttttcgcttctgcaggcgtcggcgcatgacggatcagttcgatgatcgggtcgatgttcgccagcgccacggctaatgcttcaaggatatgagcacgatcgcgagctttacgcagttcgaaaatagtacgacgggtcaccacttcacggcggtgacgaacaaacgccgcgatgatgtctttcaagttcatgatcttcggctgaccatggtgcaatgccaccatgttgataccgaaagaaacctgcaactgggtctgggagtagaggttgttgagcacaacttcaccgaccgcatcgcgtttcacttcaatcacgatgcgcataccgtctttgtcagactcgtcacgcagcgcgctgatgccttccacgcgtttttcttttaccagttccgcaatcttctcgatcaggcgcgctttgtttacctgatacggaatttcgtggacgataatggtttcacgaccggttttggcgtcaacttccacttctgcgcgagcgcggatatacaccttgccgcgaccggtacggtaagcttcttcaataccgcgacgaccgttaatgattgccgccgtcgggaagtccggccccgggatgtgttccatcagcccttcaatgctgatgtcttcatcatcgatatacgccagacaaccgttgatgacttccgtcaggttgtgcggcgggatgttggttgccatacctacggcgataccggaagaaccgttcaccagcaggttaggaattttggttggcatgacgtcgggaattttttccgtgccgtcatagttatcaacgaaatcgaccgtctctttttcgagatcggccatcagttcatgggcaattttcgccagacggatttccgtataacgcattgccgccgcagagtcgccgtcgatggaaccgaagttaccctgaccgtctaccagcatgtaacgcagcgagaatggctgcgccatacggacgatcgtgtcataaaccgccaagtcaccatggggatggtatttaccgattacgtcaccaacgacacgggcagattttttataggctttgttccagtcattgcctagtacgttcatggcgtaaagtacgcgacggtgtaccggcttcaggccatctcggacatctggcagcgcacggccaacaatgaccgacatcgcataatccagataggagctcttcagctcttcctcaatgttgaccggtgtaatttctctcgcaaggtcgctcatctaaccgctatccctctactgtatcccggattcaaaggtcgcaaattataacacagccgcgcagtttgaggtaaacctatacgctttattcacatccaatgcctgatatactcgtttgtcttgccaattacggagtagaagtgccaatgaatgccgaaaaatcgccggaaaaccataacgtagaccacgaagagatcgctaaatttgaagccgtcgcctcccgctggtgggatcttgaaggtgagttcaaaccgttgcaccgcattaacccgctgcgtctgggctatattgccgagcgtgctggcggtttatttggcaaaaaggtgctcgatgtcggttgtggcggcggcattctggccgagagtatggcgcgcgaaggcgcgacggtgaccggtctggatatgggctttgagccattgcaggtggcaaaactgcacgcgctggaaagcggcattcaggtggattatgtgcaggaaaccgtggaagagcacgcggcaaaacatgccgggcagtatgatgtggtgacctgcatggagatgctggagcacgtccccgatccgcagtcagtggtcagagcctgtgcgcaactggtgaaaccaggcggcgatgtctttttctcgacgcttaaccgcaacggcaagtcatggctgatggcggtggttggcgcggaatatattttgcgcatggtgcccaaaggcacgcatgatgtgaagaagtttattaaaccggcagaactgcttggctgggtagatcagacaagccttaaagagcgacatataaccgggctacattacaacccgctcactaatacttttaaactcggccccggcgtggatgtgaactatatgctgcacacgcagaataagtgaggttgttgtttggccgagccaatgcctgatgcgacgcttgccgcgtcttatcaggcctacaaatgctccccgtaggccggataaggcgtttacgccgcatccggcaaccgtgccgactagacagtgattaccatttcaccgtcatcgacaaaaaccctgccatctgggcaaaatcatcactccctttctgccacgccacgctgccgcgcagggacactcgctgactgatattgcccgtgactcccacttttatttcaccccgttgcttcaccgcatcgtcactgatagtgctgccatcctcttcaatttccgtcgaatggggatcgtgataataattcagatctaatgttggtatgacatgaacagcggtacgccattcgctgtgtaaacccagccgcatctgaatatcatcaccctgcgattgtgacacgcgcgcacggttagcggcggtaaaatcatcctgctgcacgccctgataaatcacctgcgcctgcggttcaatcaccacaccacgccccggtaaccactgatacccggcttccagcgaggcgataatccccgacgagtggtaatgatctgtgccatcgtcttgttcggaaacatcattgttaaaccacgcgtattgcagccagctatccagccaggccccctgcttctgattaccgtgctgataccagcttgaggtcagcccaacggcataaccgtggttctggttatcggcgcgagttccggtcatattcgagcggctctcgccctgattatcactgtagccaccaaccgccccaagcatccactcgccatcatcgccccagcgcccgctaaacaggtcaccgctaagctgcaccgtagaagtgtcttcatgctgagccagttgccctgccgccgtgtaatgataacgtccgccgataacacgtaaattcagcgtctgaccattgccacctgcatgatcgcgtcgctccatcataaacgcctgatttgccgcccgcagattattgagataaccgccaactttggcattcagcaccggctggtaagcggggattggatcgggtgttgggtcaggatcgggtgttgggtcagggtctggatcaggtggcaatggtggcgttacttcttgcgatcgcagataccagtcgttgttatcttccaccagcgtgtagtcatatgctcccatattgacgtagccgctgcctgccagactgaacttcgcattgttttgaaactgcgtgggatcggctgcgaaatcaaccactttaatgcctgtcgatgtcggctcaccaatccctgtaatggagttaaccaccacagttgtgttgccagcagtattaccgttcaacaccaattgatcgcttaccgagtcatcgccgtttaattcgctatcgagcagtagcgtaccgccgccggtataatcaccgtttaccgtcagcgtatcgccagcgacgccattttgcaggctaaccgcaccggacgtattggtcagattgccattaaccgtcacgtcggaaagataggtcaggctgtcagtttcaaggttggtattaagctcacctgtcaacgtcacgccatcggtggcattcaccagcgtcccatcgccgttaaacaatgaggcattaagggcgacggaagtatcctgcccggtcagacgcaaaaccgtaccatcgctgatatcgatagtgccgctggaagtagcatcgatagactgaatatcctgatccgcgccagtaacgaacgtcgccccatcaccgacccacagtgacgaagcataaggaaagatatccgcaacatcgcctttcagggtgccttcttcgacacgtactgccgactgcgttgtaccgctggcggtcagctccagcgtacccgcccccgttttagtaaatgtgctaccctcatcctgatgctgcccgctgctgtcagccatcagtgcgccccactgcgtgtctacccccgcatcaactgccacttcaccgtcggcgcgcatttcaatatcacgcccatgctcagtcgtcgtagagcgagtatcgacattggcagtaatctccatcacgctttcttgttgcttatcggtaaagataacctggcggttatagtgggtatctccaagctgcgagttgtcgctcaccatcagcgtaccggaggcgatttgtgttgtgcccaaataactattattgtttgccagacttacctgcccgtcgctcgcatcgaccaccacgtagacgccatctttcccgtcgccgccgatatgcaaattgtcgccacctgcaagatctaccacatcctgactgccgataaccgttccgctgctgccactgacttcaaggccatcattgtatgatgtgccgctctgccaggtggagaaatcagagagatcgagcacaccgccgtttaacacgatcgactgcggatcgtcctggagagcggcgagatctgccgcgtcgccttccagcgaaagcaccgcaccatcatcaacgactatatcgccggttagcgccatcgactgcgcccccgacagcacgtagctgccgttttgcgcaatggtgagctgaccagcaccttcgatggtgccagcaaaactgccttgattaacagtaacattgccaccagcatcgatatttaaagtgccattctgaaagcccgtcaatgagtgcacaaaggtttgttgggtggagccaacgtttagctctgcctgattctggtacttatcaatactccctatcgtcagaccgtagcagtcttgcggatcgtcctggcaatgcgtatcgccgacattcatcagggagttgctgcggcccagggtaacttcaccgttttcaatctgcatctcaccagtaaagtcattgttatctgcattaagtaccagatcgccggaacctgttttggtgatcaacccggtaccagcaatagagtcaacagctccgtcattctctgtattgccaataaccagcgtttttccgtcggcaatatcaaaggtaacttcacttaagccgagatacataaagccacccgccgcagtggaaggaccatctccatagcctgctgcgctgttgttctcatccactaacacgccgccgttctggctgtagctgtcatcaacagaaatatcaataagatagggagccgtcgcgctattggtatatatcgccccgccataaccttcggcagtgttatttgtaaaggcagtgttatttattatcgtataacctgaaggatgcttgctgacgctattattatcggtaacatcgattgccccgccatcgccatcactgtaacttgttgatgtatatgcctggttgttatcaaaaataacatcacttaaatagacgtcattattaatggtataaattgcgccacctttgccatcattagcgatattattgcgaaacatggcgttagtgacacgtaaatcgacggcaccagtatcattagtaccagaagaatagattgcgccaccatagccgcctgcgacgttaccagaaaaaataacatcagtaagattcagcgttgagttttctttagcaaatatggccccgccgttattatattctcctgtaacggtgttattggcaaacagagtcattccagtttcattttctggtaatagtgaaaattccgctccttgttgcaaaaatacggctcctccgctggcgttattggtcatatccgaaaaaaccagccattgcccatcggcgacactccagtcctgcgtaatgcctgaaaggctttgcctgctggcgtgacaactcgctttgatatcatatccctggcataaatcaatggccgccgcgaaaccgttagcagagaaaagagatgcaatcattgacgggagtagagataaatactccttgcgtagaaagataatccgcatattcatctaaccattattttatataagacggcatatttaaacgcattatacaatatgggttatctttcttttgtaaattgtccaacccgatgcaatggctattatgttattatttgatgaatagtatcagtgcgtcataattcaagttaataaccttaagggataccagttatatttaaactaaattaaagtaatgaataattttcttataatataaggtaaattaacaaaatggcttcgcatttaacaataaccgaatagaaaacaaccatttcgacatcaacaatcgcttacattcgtttatatattgaccacaactgatacatcagattatgtgatgactcgtgcttagatcaattttgcaatcattagcaaaaagattaataaaccatctatatcaatttatccaacctattctgccgttcaagaaatcgccgaacagttatttttaacaaatttttctcttcccattgactttcccggacaccttgtctgacctaaggtgcgcgaaagccactttttccttcctgagttatccacaaagttatgcacttgcaagagggccattttcacactatcttgcagtgaatcccaaacataccccctatatatagtgttctaagcagcttcccttactacaggtagtctgcatgaaactattgcggaaagaattccaaaaacaggtacgacatacatgaatcagaatctgctggtgacaaagcgcgacggtagcacagagcgcatcaatctcgacaaaatccatcgcgttctggattgggcggcagaaggactgcataacgtttcgatttcccaggtcgagctgcgctcccacattcagttttatgacggtatcaagacctctgacatccacgaaaccattatcaaggcggccgcagacctgatctcccgtgatgcgccggattatcagtatctcgccgcgcgcctggcgatcttccacctgcgtaaaaaagcctacggccagtttgagccgcctgcgctgtacgaccacgtggtgaaaatggtcgagatgggcaaatacgataatcatctgctggaagactacacggaagaagagttcaagcagatggacacgtttatcgatcacgaccgtgatatgaccttctcttatgctgccgttaagcagctggaaggcaaatatctggtacagaaccgcgtgaccggcgaaatctacgaaagcgcccagttcctttatattctggttgccgcgtgcctgttctcgaactacccgcgtgaaacgcgcctgcaatatgtgaagcgtttttacgacgcggtttccacatttaaaatttcgctgccgacgccaatcatgtccggcgtgcgtaccccgactcgtcagttcagctcctgcgtactgatcgagtgcggtgacagtctggattccatcaacgctacctccagcgcgattgtgaaatacgtttcccagcgtgccgggatcggcatcaacgccgggcgtattcgtgcgctgggtagcccgattcgcggtggtgaagcgttccataccggctgtattccgttctacaaacatttccagacagcggtgaaatcctgctctcagggcggcgtgcgcggcggtgcggcaacgctgttctacccgatgtggcatctggaagtggaaagcctgctggtgttgaaaaacaaccgtggtgtggaaggcaaccgcgtgcgccatatggactacggggtacagatcaacaaactgatgtatacccgcctgctgaaaggtgaagatatcaccctgttcagcccgtccgacgtaccggggctgtacgacgcattcttcgccgatcaggaagagtttgaacgcctgtataccaaatatgagaaagacgacagcatccgcaagcagcgtgtgaaagccgttgagctgttctcgctgatgatgcaggaacgtgcgtctaccggtcgtatctatattcagaacgttgaccactgcaatacccatagcccgtttgatccggccatcgcgccagtgcgtcagtctaacctgtgcctggagatagccctgccgaccaaaccgctgaacgacgtcaacgacgagaacggtgaaatcgcgctgtgtacgctgtctgctttcaacctgggcgcaattaatagcctggatgaactggaagagctggcaattctggcggttcgtgcacttgacgcgctgctggattatcaggattacccgatcccggccgccaaacgtggagcgatggggcgtcgtacgctgggtattggtgtgattaacttcgcttactatctggcgaagcacggtaaacgctactccgacggcagcgccaacaacctgacgcataaaaccttcgaagcgattcagtattacctgctgaaagcgtctaatgagctggctaaagagcaaggcgcgtgcccgtggtttaacgaaaccacttacgcgaaagggatcctgccgatcgatacctataagaaagatctggatgccatcgctaatgagccgctgcattacgactgggaagcattgcgtgaatcaatcaaaacgcacggcctgcgtaactccacgctttctgccctgatgccgtccgagacctcttcgcagatctctaacgccactaacggtattgaaccgccgcgcggttacgtcagcatcaaagcgtcgaaagacggtattttgcgccaggtggtgccggactacgagcacctgcacgacgcctatgagctgctgtgggaaatgccgggtaacgatggctacctgcaactggtaggtatcatgcagaaatttatcgatcagtcgatctctgctaacaccaactacgatccgtcacgtttcccgtcaggaaaagtgccgatgcagcagttgctgaaagacctgctcaccgcctacaaattcggggtcaaaacgctgtattatcagaacacccgtgacggcgctgaagacgcgcaggacgatctggtgccgtcaatccaggacgatggctgcgaaagcggcgcatgtaagatctgataatcccccagcctttgcaccaaaccgtcccctctccccttgcgggagagggttagggtgaggggtaataaaaccacaggacacactcatggcatataccaccttttcacagacgaaaaatgatcagcttaaagaaccgatgttttttggtcagccggtcaacgtggctcgctacgatcagcaaaaatatgacatcttcgaaaagctgatcgaaaagcagctctctttcttctggcgtccggaagaagttgacgtctcccgcgaccgtatcgattaccaggcgctgccggagcacgaaaaacacatctttatcagcaacctgaaatatcagacgctgctggactccattcagggtcgtagtccgaacgtggcgctattgccgcttatttctattccggaactggaaacctgggtcgaaacctgggcgttctcagaaacgattcattcccgttcctatactcatatcattcgtaatatcgttaacgatccgtctgttgtgtttgacgatatcgtcaccaacgagcagatccagaaacgtgcggaagggatctccagctattacgatgaactgatcgaaatgaccagctactggcaccttctgggcgaaggcacccacaccgttaacggtaaaactgtgaccgttagcctgcgcgagctgaagaaaaaactgtatctctgcctgatgagcgttaacgcgctggaagcgattcgtttctacgtcagctttgcttgttccttcgcatttgcagaacgcgaattgatggaaggcaacgccaaaattattcgcctgattgcccgcgacgaagccctgcacctgaccggcacccagcatatgctgaatctgctgcgcagcggcgcggacgatcctgagatggcggaaattgccgaagagtgtaagcaggagtgctatgacctgtttgttcaggcagctcaacaggagaaagactgggcggattatctgttccgcgacggttcgatgattggtctgaataaagacattctctgccagtacgttgaatacatcaccaatatccgtatgcaggcagtcggtttggatctgccgttccagacgcgctccaacccgatcccatggatcaacacctggctggtgtctgataacgtgcaggttgctccgcaggaagtggaagtcagttcttatctggtcgggcagattgacgcggaagtggacaccgacgatttgagtaacttccaactctgatggcccgcgttaccctgcgcatcactggcacacaactgctgtgccaggatgaacacccttcccttctggcggcgctggaatcccacaatgtggcggttgagtatcagtgtcgcgaaggttactgcggctcctgtcgcacccgtctggttgcaggtcaggttgactggattgccgaaccgttagcctttattcagccgggggaaattttgccctgttgttgccgggcaaaaggcgatattgaaatcgagatgtgaattggttgtagtgccagatacaacgcttatgcgtcttatctggcctacaacgattacatggcgtagtaatacgctttcacctgctcccagtccgctttggggattggctccagatatttttccagctggcggaagtcatgattaatcgctttatcgcgacgcaagcggcgacgacttttctccaggtcaagaaaaccagcttctgcattaccttctgttttcacatagatatggcgaacataacaacagccatgctgacgattaatgctatgcattttcttaaacgccagcgccactgctttcaacatggcttgccgtacttcgtcagaataaggcgatactgcatgctgggcataccagtcagcaatgctgatgaaccccgccatatcttcagtcaccagcaacgctcgccattcaccctcaattttcaccgcttcaccaaaaacgatcttcggcacgatgacaccggcccgttccagttctttaattaccgcaacctcacggacaatcgttggtcggccgaacggataacgtacggaatgaaacagatgatgcgtcatgcgctttacatacagctttttgccgttgcgctcgacgcattgcaccccgctcataccattacggcgatagttaggctcttcaacccagtcgccctctgttgcccaccagtgattaaattcgtcgtactttgctgaaactgccataccctatcgcctgttatttttattaacgacaatgactataggtggttacctgaggaaaatcttaatgaaacgtgtcgtattaatgaatttcttttgccactactagcttgacaccgcttttacccttcatttgcagcgcatagattccaccagccactaccactaatagtgcgcccagcagataaaatgtgaatttaatcaggcggatacagcgatgaattttattcgacagggattaggcatcgccttacaaccagagttaacgctgaaaagcattgcaggtgaattgtgttccgttcctctcgaaccaactttctatcgacagatttcgttgctggctaaagaaaagccggtagaaggcagtccactgtttttactacaaacgtgtacggaacaactcgtggtgaatggaaaaatttgatgtgagacaggatggcgcatgaacgccatcctgcagtagcattactctttattaaggaattttactgccttatcagggaaatcagtaaacagcccatttacacccgctttgttatacagagcatcatataactgattcacatcagtagtgtattcaggcagtttatctgaccgcacggtataaggatgcactaccagtttattctgctgagcatcttgcaccatgccagtgagtttgatattacccggctgcgatgtttcctcaatcaacatatggtaatccggcccgataccgtcggcatattccgccacctgtttcatagcacccggcttaaacatccagtcgtagttgtaattaacccagcttccatccggctgtttctgctgcgtttcattccagtcggtataggcaatcaactgtaccagattgagatccatgcccattttaggttccagctcattcttaatacgcttcagctcatcagcatcaaaacattgcaaataaactttgtcgtccttaccggtgtaaccatatttcttcagcacttccagcgtttttgccgcaatatccttcccttcctgatgatggaaccacggcgctttgatttcaggataaataccgatatttttcccggtagagtgatttaacccctgaacaaattcaatctcttcttcaaaggtgtgcacccggaagtcggacttacccattgggaaacgccccggataagtctgcacttttttaccgttttcaatatcgaaaccttcggtaaatttcagcgacttaatttcatccagcgtgaaatctatcgcgtagtaacgaccgtctttgcgcgcccgatccgggaaacgatcggcaacatcagtaacacgatcgagataatggtcatgcagaacaaccagatggtcgtctttggtcatcaccaaatcctgttccagataatccgctccctgcgcatacgccatcgcttttgctggcagcgtatgctccggcaaatatccactggcaccgcgatgggcgatgactattttttcgttgctgtccgccgccattgcactgcttcccatgactatagtgctcatcatgatcgccatgctaaggtttttcagcgtcaatttcatgccattagcctccgttgcgtttttgcagtaattgttcatggcgacgtttttcgccaatcatcacaacaatcaacaagataaccgccagaatgctgccgccaatcattaccataaagccgccatcccagccgaagaagtccacggtgtagccaacaatcgcgctcgccgccaccgaaccgcccaggtaaccaaacagcccggtaaagcccgctgccgtacctgccgcttttttcggtgccagttccagcgcatgcagaccgatcagcatcacaggaccgtagatcaggaagccgataacaatcatacaaatcatatcgacggttgggttacctgccgggttcatccagtaaacgatagtcgcgatggtcaccagtgtcataaagaaaacgccggttgccccacggttgccacggaagactttatccgacatccagccgcacagcagagtgcccggaatacctgcatattcataaaggaagtaggcccaggaggatttatccagcgcgaaatgcttaacctctttcagataagtcggtgaccagtcgaggatgccgtaacgcagcagataaacgaacacgttggcgatggcgatataccacagcagtttgttcggcagtacgtactgcatgaagatttgcttcgccgtcagctcctgttccgctttttcgttatagtcgtccggataatcatttttgtactcttcgatcggcggcaagccacaggattgcggggtatcgcgcatcatcgcaaaggcgaataatgccaccagaatggcgcagaaagcaggcatatagagcgccgcatgccagtcattgaaccaggccatccccagcaggaacagcagcggcggaataccaccaccgacgttgtgcgcacagttccacactgacacaatgccgccacgttctttctgcgaccaccagtgcaccatagtacgaccacacggcggccatcccatcccctggaaccaaccgcagaggaacaacagtacaaacatcaccgcaatgctcgacgtcgcccatggcacaaagcccataaacaacatcactgccgccgccagaatcaaacctgcgggcaggaaaacgcgcggattcgagcgatccgataccgaacccatgatgaatttcgaaaatccataagcaatcgagatccccgaaagggcaaaacctaaatcaccgcgtgagaatccctgctcaaccagataaggcatagcaagcgcaaagttcttacgaaccaaatagtaagccgcatagccaaagaatatccccaggaaaatttgccagcgcaatcgacgataagtcggatcgatctccgcagcaggtaagcgcgctttgtgtggcgctggtttaaaaatactcaacattgaaagcctccgtggcccgtggtcttatttatgattaacagactgattcagtgggagaacctgccgtttctttagttgccgcgatgttaagaaaacattcagaaattaaatgtgaattgccgcacacattattaaataagatttacaaaatgttcagaatgacgcatgaaatcacgtttcactttcgaattatgagcgaatatgcgcgaaatcaaacaattcatgtttttactatggctaaatggtaaaaaacgaacttcagagggataacaatgaaaactcgcgactcgcaatcaagtgacgtgattatcattggtggcggcgcaacgggagccgggattgcccgcgactgtgccctgcgcgggctgcgcgtgattttggttgagcgccacgacatcgcaaccggtgccaccgggcgtaaccacggcctgctgcacagcggtgcgcgctatgcggtaaccgatgcggaatcggcccgcgaatgcattagtgaaaaccagatcctgaaacgcattgcacgtcactgcgttgaaccaaccaacggcctgtttattaccctgccggaagatgacctctccttccaggccacttttattcgcgcctgcgaagaagcagggatcagcgcagaagctatagacccgcagcaagcgcgcattatcgaacctgccgttaacccggcactgattggcgcggtgaaagttccggatggcaccgttgatccatttcgtctgaccgcagcaaacatgctggatgccaaagaacacggtgccgttatccttaccgctcatgaagtcacggggctgattcgtgaaggcgcgacggtgtgcggtgttcgtgtacgtaaccatctcaccggcgaaactcaggcccttcatgcacctgtcgtggttaatgccgctgggatctgggggcaacacattgccgaatatgccgatctgcgcattcgcatgttcccggcgaaaggatcgctgctgatcatggatcaccgcattaaccagcatgtgatcaaccgctgccgtaaaccttccgacgccgatattctggtgcctggcgataccatttcgctgattggtaccacctctttacgtattgattacaacgagattgacgataatcgagtgacggcagaagaggttgatattctgctgcgtgaaggggaaaaactggcccccgtgatggcgaaaacgcgcattttgcgggcctattctggcgtgcgcccgctggttgccagcgatgacgacccgagcggacgtaacgtcagccgtggcatcgtgctgctcgaccatgctgaacgcgatggtctggacggatttatcaccatcaccggtggcaaactgatgacctatcggctgatggctgaatgggctaccgacgcggtatgccgcaaactgggcaacacgcgcccctgtacgactgccgatctggcactgcctggttcacaagaacccgctgaagttaccttgcgtaaagtcatctccctgcctgccccgctgcgcggttctgcggtttatcgtcatggcgatcgcacgcctgcctggctgagcgaaggccgtctgcatcgtagcctggtatgtgagtgcgaagcggtaactgcgggtgaagttcagtacgcggtagaaaatttaaacgttaatagcctgctggatttacgccgtcgtacccgtgtggggatgggtacctgccagggcgaactctgcgcctgccgcgctgccggactgctgcaacgttttaacgtcacgacgtccgcgcaatctatcgagcaactttccaccttccttaacgaacgctggaaaggcgtgcaacccatcgcctggggagatgcactgcgcgaaagcgaatttacccgctgggtttatcagggattgtgtggtctggagaaggagcagaaagatgcgctttgatactgtcattatgggcggcggcctcgccggattactctgtggcctgcaactgcaaaacacggcctgcgctgtgccattgtcacgcgtggtcaaagcgcgctgcatttctcatccggttcgctggatttgctgagccatctgcctgatggtcaaccggtgacagacattcacagtggactggaatctttgcgtcagcaggcaccagcccatccttacagtcttctcgaaccacaacgcgtgctcgatctcgcttgccaggcgcaggcattgatcgctgaaagcggtgcgcaattgcagggcagcgtggaactggcccatcagcgcgttaccccgctcggcactttgcgtgcaacctggttaagttcgccagaagttcccgtctggccgctacccgcgaagaagatatgtgtagtggggataagcgggctgatggatttccaggcgcatcttgcggcggcttcgttgcgcgaactggatctttcggttgaaaccgcagaaatagagctgccggaactggatgtcctgcgcaataacgccaccgaatttcgcgcggtgaatatcgcccgtttccttgataatgaagaaaactggccgctgttacttgatgcgcttattcctgtcgccaatacctgcgaaatgatcctgatgcccgcctgcttcggcctggccgatgacaaactgtggcgttggttgaatgaaaaactaccttgttcactgatgcttttgccaacgctgccgccttccgtgctgggcattcgtctgcaaaaccagttacagcgccagtttgtgcgccagggtggcgtgtggatgccgggcgatgaagtgaaaaaagtgacctgtaaaaatggcgtagtgaatgaaatctggacccgcaatcacgccgatattccgctacgtccacgtttcgcggttctcgccagcggcagtttctttagtggcggactggtagcggaacgtaacggcattcgcgagccgattctcggccttgatgtgctacaaaccgccacgcggggtgaatggtataagggcgatttttttgcgccgcaaccgtggcagcagttcggtgtaaccactgatgagacgctacgcccgtcgcaggcagggcaaaccattgagaacctgtttgccatcggttcggtgctgggcggatttgatcccatcgcccagggatgcggcggcggtgtttgtgccgtcagtgctttacatgccgctcaacagattgcccaacgcgcaggaggccaacaatgaacgacaccagcttcgaaaactgcattaagtgcaccgtctgcaccaccgcctgcccggtgagccgggtgaatcccggttatccagggccaaaacaagccgggccggatggcgagcgtctgcgtttgaaagatggcgcactgtatgacgaggcgctgaaatattgcatcaactgcaaacgttgtgaagtcgcctgcccgtccgatgtgaagattggcgatattatccagcgcgcgcgggcaaaatatgacaccacgcgcccgtcgctgcgtaattttgtgttgagtcataccgacctgatgggtagcgtttccacgccgttcgcaccaatcgtcaacaccgctacctcgctgaaaccggtgcggcagctgcttgatgcggcgttaaaaatcgatcatcgccgcacgctaccgaaatactccttcggcacgttccgtcgctggtatcgcagcatagcggctcagcaagcacaatataaagaccaggtcgctttctttcacggctgcttcgttaactacaaccatccgcagttaggtaaagatttaattaaagtgctcaacgcaatgggtaccggtgtacaactgctcagcaaagaaaaatgctgcggcgtaccgctaatcgccaacggctttaccgataaagcacgcaaacaggcaattacgaatgtagagtcgatccgcgaagctgtgggagtaaaaggcattccggtgattgccacctcctcaacctgtacatttgccctgcgcgacgaatacccggaagtgctgaatgtcgacaacaaaggcttgcgcgatcatatcgaactggcaacccgctggctgtggcgcaagctggacgaaggcaaaacgttaccgctgaaaccgctgccgctgaaagtggtttatcacactccgtgccatatggaaaaaatgggctggacgctctacaccctggagctgttgcgtaaaatcccggggcttgagttaacggtgctggattcccagtgctgcggtattgcgggtacttacggtttcaaaaaagagaactaccccacctcacaagccatcggtgcgccactgttccgccagatagaagagagcggcgcggatctggtcatcaccgactgcgaaacctgcaaatggcagattgagatgtccacgagccttcgctgcgaacatccgattacgctactggcccaggcgctggcttaaccgaccttttgatgcccggtaagcacattgcttatcgggcatttttgcgagcgcgattccacgcaccatgtatgcgttgcaacgctttgaaaattcctctgaaaatgtctcgcaaaggctgaaactgacagatgtcaaaggcccgggatagacgtaatgtcgcgtcatcataaatatcaggtgacggacaaccatgaccgaatcaacaacatcctccccgcatgatgcggtgtttaaaacctttatgttcacacccgaaaccgcaggggattttctcgaaatacatttaccagaaccactgcgcaagctttgcaacctgcaaaccttacgcctggaacccactagttttattgaaaaaagtttacgcgcttactactcggatgttttgtggtccgtggaaaccagcgacggtgacggctatatctactgcgtgattgaacatcaaagctctgcagaaaagaatatggcttttcggctaatgcgctatgccactgccgccatgcagcgtcacctggataaaggctatgacagagttccgctggtggtgccattgctgttttatcatggcgaaacatcgccctacccgtactcacttaactggctggatgagtttgacgatccgcaacttgcccggcagttgtacaccgaagcttttccgttggtggatatcaccatcgtacctgacgatgagatcatgcaacatcggcgtatagctctgctggaactgattcaaaagcatattcgcgaccgcgatttaatcggcatggtcgacaggatcaccacgcttttggttagaggcttcactaatgacagccagctacaaacactgtttaattatctgctgcaatgcggcgatacctcccgtttcacccgttttattgaggagattgccgaacgttcaccactacaaaaggagagattaatgactattgctgaacggctacggcaggaagggcatcaaattggctggcaggaaggtatgcatgaacaagccattaaaattgctttgcgcatgctggaacagggcattgatcgtgaccaggtgctcgcggccacccagctaagcgaagccgatctggcagcgaataaccactaattaacacaggcccacagccgatccccatgggcctttgatatcaataactaccttttatgcgtggcccatttttgcctgatttaaacatcgccagtcgttgatccagggcatcgctgtagagcatcgtgtcaacgccaacagcgacaaagttcgctccccacgccaggcattgctgcgccatatcaggagccacagccagaaaaccagccgctttacccgcagcacggatccgccgaatactggtttcaataattcgctgcacttccgggtgccctgcgttatccgggtagcccaacgacgcagaaagatccgcaggtccaataaacacgccatcaatcccttcgacgtcgaggatttcgtccaggttatccagtgccgttttactttccacctgcaccaacagacaaagtgaatcgttaacttgcgccatgtaattctcaatgcgtccccagcgcgcagcccgtgccacactggccccaacaccacgctcaccgtagggagggttggacaagttttgccggagggggaatgtgccggtgcagtaaaccggcacagagtggcggaatcagacagataaggtcatggactcaataacctcaatccagccatgctcactggcgatatcctggccgtttaaccaacggcgcagcatattcagtgccatcattgcgcacacttcctgacggatagccaggctgtagcgtgtagtgctgaaacgcacacgcagagcgaaagtgccgtctggcgtggctagcgcaaagttgagatgctcgttctcgaaacccgaaacagccagtgccagcccggcaaaatggttggcccgccgttctgtaatccagtgcgcagtttgcgccagggtttcttcctgtgaaggaaccacttcacacgccagcaatggagcacctgcgcgagaaagttgcaaagccaataaaccgccggtgaattgctcgctcaacgtcaggctgaactggcggttttgcaattcgcgactgatctgcgcgggcagtccttcggtgccttcgaaaatcacgctctgtccggcaacacgtttaacgtccagccacagtttttccatcgcctgttgctcgcttgccggtccggtgagtttcagttcgataatcggcattgaagagcgatagcccattgttacgcccggcggcagttgtagagtgtccaggctttgtgccagatcgctttccgaacgaccaaaggtagttaaacgcagacaaaccggcggctgtggtaaagaaaaacgctcgcgcagacgcggcaggatttcgtgctcgaccatcaccttaaattctgacggtacgccgggagtaaagaacatcaggcaacgattaagctgcacggcaaaaccacaggcggtgcctaccgggttattgataaattcagcactggcaggcagctccgcttgtttacggttgctcggtgccattactcgtccacgttcgtggaaatagcgttccatctctttgagccaggcttcatgcagcaccaggccttcaccttttgctgtcgcagcggcgagtgcgcttaaatcatcgctggtcggtcccagcccgccgttaacgatcagcacatcggcgtgctgactacgttcgcgaagaatggtgactaagtcatcaaggttatcccccaccgtattgcggcgagataatggcagcccctgatgaaagaaaaaatcggccagccaggcagcgttagtgtcaacgatttgcccgtgtaacacttcatccccggtggatagcatttccacttttaacatggttatctcctgcttttgttatcgaatcactataacgcaaagggagataaggcgtagtaagaaactgaatggcgcgacagaatgccgcgccggaagggatcagaaactggcgttaaccccaacatacgggccgtcagccacggcgttgtcgcggttaccgtctttacccgacagattcaggtagcgataacccgcctcaatactgactggacgcataatggtgtaacgcgcgccagcattcgcttcctcataactttgaataccgctggagagcgaatccggagagtagtaatactcgccaaacaaacggaagctgttgccaattttccactgcaaaccacctcctaccgctgcggcataaccttcatcgccgtaattcgggttggtgtaaacgccttttccgccaacggtcgccattaacggcccgagaggcagattcaaccccagccccacgcccgcgacgtcaccgtcgtcgtcgttatgtgtccagttaccgcttaaagccaggcccgtcgattcagtcccaaaaccgacaccaatattggtgtattctttacccgcctggccgctgatgctcattgcattgaccgatgcagaaaccaacagcattccggccagacctgctagcgcaatttttttcattatcccctttcccacaagcaattaatcaaaattcccaaagctgcgggattgtactgcctggcacagaggattcaatgagcgaaaaaagggatctagtcacttattgtaactaaatacttcttaaataattaaacgccgaaaaaataaacacactttaccgatacacacaaaaataataataagtgcagttatcattgcaaaagagattactgtcactttcacatatttctgagttaccgtattctcatggtttctttttatttataaggaatacccctatgcgacaacggactattgtatgccctttgattcaaaatgatggtgcttatttgctgtgtaaaatggccgacgatcgcggcgttttccccggtcaatgggcgctttcgggtggcggcgtggagtctggcgaacgaattgaagaggcactacgccgcgaaattcgcgaagaactgggagaacagctgcttttgacagaaatcacgccgtggaccttcagcgatgatattcgcaccaagacgtatgcagatggtcgcaaggaagagatttatatgatttacctgatttttgactgcgtttctgccaaccgagaagtgaaaataaacgaagagtttcaggactacgcgtgggtaaaacctgaagatctggtgcattatgatttaaatgttgccacccgaaaaacgttacgtttgaaaggtcttctttaacaatgatgacagccatcactggctgtcagattgaaaatttagtggttaacgaattccccatccagataaactttgcctttttccacatgcatgactaaaccatccagataatcaggtttaaatgtcgcatcacgcttatttttagcaatatatgtcaggcaatgattatgggtgaaaataacgatatttttatcaggcgctttgctttgtaagtccttaattgcactataaatctcattaccgcactgaagaagtcgtttatctaccgtcagctttttacccgcggaaaaccaggtcgccgactgaatggtccggacggtattactggaataaagatcgaaatcagggatgtcagcgctaaaagcgttgcccagttcacgggcatcctgggtacctttaaccgtaatacctgttttatctgacaagcattgattggttgaacgatcgcaacgttcagcatggcgaaacaaaacgacaaccgggtgctgctgtgccagtctggccaatgttttattgtcgatacgtggcaaaccattgctactccaggcggcatgagtacccagtccggcaattgcagcgagcgccagtaaaatgatgaaatatttttttgacttcaatgatgagcggcaaaaagctaacacgtaaactccacctatagacaagcgcaaccagacaattaccgtaaaattgagcgacatttctggcgataattagcagttggtgtaatattaaaaatcctacgatgtcggcaaaatgcctcaaaattttgccaaatgcaaagcctaaataagaaaaaatataaaaatttcaatatttacgtctaatattagtttcttaaggttaagttaatattctatccttaaaatttcgctccaaatggcaaaatatacacaacactctttatagcaaatataagtggacaggtattcaatggcggaaggaaaagcaatgtcagaatttttgcctttttcgcgaccagcaatgggcgtggaggaactcgctgcagttaaagaggttctcgaatccggttggatcacaaccggtccgaagaatcaggcgcttgagcaagccttttgccagttgacgggaaatcagcatgccatcgcggtcagttcagccaccgccggaatgcatatcacgctaatggcgttggaaattggcaagggcgatgaagtgattacgccttccctgacctgggtttcaaccctcaatatgatttccttgttgggtgcaacgccggtaatggtggatgtcgaccgcgatacgctgatggtcacgcctgaagcgatcgagtcagccataacgccacgcactaaagccatcattccggtgcattatgccggtgcgccagcagatattgacgccattcgcgccattggcgaacgttacggcatcgcagttatcgaagatgctgcccatgccgtcggtacgtattacaaagggcgacatattggcgcaaaaggtaccgctattttttcatttcatgccattaaaaatattacctgtgcggaaggtggcctgattgtaactgataatgaaaaccttgcccgccagctacggatgctgaaatttcacggtctgggtgtcgatgcctatgacagacaaacctggggccgtgcaccgcaggctgaagtcttaacaccgggctataagtacaatctgaccgatattaacgccgcgattgccctgacacagttagcaaaattagagcacctcaacacccgtcggcgcgaaattgcccagcaatatcagcaagcactggcagctctcccctttcagccattaagccttcccgcctggccgcacgttcacgcctggcatctgtttattattcgtgtcgatgaacaacgttgtggtatcagtcgcgatgcgttgatggaagcgttaaaagaaagaggcattggtaccgggttacatttccgcgccgctcacacacaaaaatattatcgcgagcgttttcccacgctgtcgttaccgaataccgaatggaatagcgaacgcatctgttctttgccgctgttcccggatatgactaccgccgatgccgaccgtgtcatcacagcccttcagcaactcgcaggacaataagccatgtttgaaatccaccctgttaagaaagtctcggtggttattcccgtttataacgagcaggaaagcttaccggaattaatcaggcgcaccaccacagcctgtgaatcgttggggaaagagtatgagatcctgctgattgatgacggcagtagcgataattccgcgcatatgctggtcgaagcctcacaagcggagaacagccatattgtgtctattttgcttaaccgcaattacgggcaacattcagcgattatggcgggattcagtcacgttaccggcgacttaattattacccttgatgccgatctccagaatccgccagaagaaatcccccgcctggtggcaaaagccgatgaaggttacgacgtggtagggactgtacgccagaaccgccaggacagctggtttcgtaaaacagcttcgaagatgattaaccggcttattcagcgcaccaccggcaaagcgatgggtgactacggttgtatgctgcgcgcctatcgccgtcatattgtcgatgcgatgttgcactgccatgaacgtagcacctttatcccgattctggcgaatatcttcgcccgccgtgccattgaaattccagtacatcatgccgagcgtgagtttggtgaatccaaatacagttttatgcgcctgattaatttgatgtacgacctggtgacctgccttaccacaacgccgctacgtatgctgagtctgctcggcagcattattgcgattggaggttttagcattgcggtgctgctggtgattttacgcctgaccttcggaccacaatgggcggcagaaggcgtctttatgctatttgccgtgctgtttacttttattggcgctcagtttatcggcatgggattactcggtgaatatatcggcaggatctacaccgatgtccgcgcccgcccccgctattttgttcagcaagttatccgtccatccagcaaggaaaatgaataatgaaaaccgtcgtttttgcctaccacgatatgggatgcctcggtattgaagctctgctggctgccggttacgaaattagcgccatttttacccataccgataatcccggtgaaaaagccttttatggttcggtggctcgtctggcagcggaaagaggcattccggtttatgcgccggatgacgttaatcatccgctgtgggtggaacgcattgcccaactgtcgccagatgtgattttctctttttattatcgccatcttatttgcgacgaaattttgcagctcgctcccgcaggtgcatttaatctgcatggttcgctgttaccaaaatatcgtggtcgcgcgccgctgaactgggtgctggtcaacggtgaaacggaaactggcgttacattgcaccgaatggtgaaacgtgccgatgccggggccattgtggcgcaactgcgcattgccattgcgccagacgatatcgctattacgctgcatcataaattgtgccatgccgcgcgccagctactggaacagacattacccgccattaaacacggtaatattctggaaatcgcccagcgcgaaaacgaagccacctgttttggtcgcagaacgccggatgacagtttccttgaatggcataaaccggcatccgtactgcacaacatggtacgtgccgttgccgatccgtggccgggtgccttcagctatgttggcaatcagaaattcaccgtctggtcgtcgcgtgttcatcctcatgccagcaaagcacagccggggagcgtgatttctgttgcgccactgctgattgcctgtggcgatggcgcgctggaaatcgtcaccggacaggcgggcgacggcattactatgcagggctcgcaattagcgcagacgctgggcctggtgcaaggttcacgcttgaatagccagcctgcctgcaccgcccgacgccgtacccgggtactcatcctcggggtgaatggctttattggcaaccatctgacagaacgcctgctgcgcgaagatcattatgaagtttacggtctggatattggcagtgatgcgataagccgttttctgaatcatccgcattttcactttgttgaaggcgatatcagtattcattccgaatggattgagtatcacgtcaaaaaatgtgatgtcgtcttgccgctggtggcgatagccacgccgattgaatatacccgcaacccgctgcgcgtatttgaactcgattttgaagagaatctgcgcattatccgctactgcgtgaagtaccgtaagcgaatcatcttcccgtcaacttcagaagtttatgggatgtgtagcgataaatacttcgatgaggaccattctaatttaatcgtcggcccggtgaataaaccacgctggatttattcggtatcaaaacaattacttgatcgggtgatctgggcctatggcgaaaaagagggtttacagttcaccctcttccgcccgtttaactggatgggaccgcgactggataaccttaatgcggcacgaatcggcagctcccgcgctattacgcaactcattctcaatctggtagaaggttcaccgattaagctgattgatggcggaaaacaaaaacgctgctttactgatattcgcgatggtatcgaggcgttataccgcattatcgaaaatgcgggaaatcgctgcgacggtgaaattatcaacattggcaatcctgagaacgaagcgagcattgaggaactgggcgagatgctgctggcgagcttcgaaaaacatccgctgcgccatcatttcccaccgtttgcgggctttcgcgttgtcgaaagtagcagctactacggcaaaggatatcaggacgtagagcatcgtaaaccgagcatccgcaatgcccaccgctgcctggactgggagccgaaaattgatatgcaggaaaccatcgacgaaacgctggatttcttcctgcgcaccgttgatcttacggataaaccatcatgaccaaagtaggcttacgcattgatgtcgatacctttcgtggcacccgtgaaggcgtgccgcgtctgctggaaatcttgagtaagcataatattcaggccagcatttttttcagcgtcggcccggacaatatgggccgccatctctggcgactggtgaagccacagtttttgtggaagatgctgcgctcaaatgcggcatcgctttatggctgggatattttactggcaggtacggcctggccaggtaaagagattggtcatgccaatgccgatatcattcgtgaagcggctaaacatcacgaagtcggcctgcacgcctgggatcaccatgcctggcaagcccgtagcggtaactgggatcggcaaacaatgatcgacgatattgcacgcggccttcgcactctggaagagattatcggtcaaccggtaacctgttctgccgctgcgggctggcgtgccgaccagcaggtgatcgaagcaaaagaagcgttccatttgcgctacaacagcgattgtcgtggggccatgccgttccgtccactgctcgaatcaggaaaccccggcactgcgcaaattccggtgaccttacccacctgggatgaagtgattggtcgggatgtgaaagcagaagattttaacggttggttactcaaccgcatcctgcgagataaaggcacgccggtttataccattcatgcagaagttgaaggctgcgcttatcagcataattttgtggatctcctcaaacgcgcagctcaggaaggcgtgacattttgccctttaagcgaactgttatcagagacgttgccgctcggacaagttgttcgcggaaatattgccggacgtgaaggctggctgggttgccaacaaattgcgggtagtcgctgatgaaatcggtacgttaccttatcggcctcttcgcgtttattgcctgctattacctgttaccgatcagcacgcgtctgctatggcaacccgatgaaacgcgttatgcggaaatcagtcgagaaatgctggcatccggcgactggattgtgccccatctgttagggctacgttatttcgaaaaacccattgccggatactggattaacagcattgggcaatggctatttggcgcgaataactttggtgtgcgggcaggcgttatctttgcgaccctgttaactgccgcactggtgacctggtttactctgcgcttatggcgcgataaacgtctggctctactcgccacagtaatttatctctcattgtttattgtctatgccatcggcacttatgccgtgctcgatccgtttattgcattctggctggtggcgggaatgtgcagcttctggctggcaatgcaggcacaggcgtggaaaggcaaaagcgcaggatttttactgctgggaatcacctgcggcatgggggtgatgaccaaaggttttctcgcccttgccgtgccggtattaagcgtgctgccatgggtagcgacgcaaaaacgctggaaagatctctttatttacggctggctggcggttatcagttgcgtactgacggttctcccctggggactggcgatagcgcagcgggagcctgacttctggcactattttttctgggttgagcatattcaacgctttgcactggatgatgcccaacacagagccccgttctggtactacgtgccggtcatcattgccggtagcctgccgtggctgggattactccccggtgcactgtacacaggctggaaaaaccgcaagcattccgcaaccgtctatttgttgagctggacgataatgccgctgctgtttttctccgtcgctaaaggcaaattgcccacctatattctttcttgctttgcacctctggcaatgctgatggcgcattacgctttgctggcagcaaaaaataatcctctggcgttgcggattaatggctggattaacatcgcttttggcgtcactggcattattgccacatttgtggtctccccctggggaccaatgaacacgccggtgtggcaaaccttcgagagctataaagtcttttgtgcctggtcgatttttcgctatgggcatttttcggctggtacaccttaacaaacgtcgaaaagacctggtcttttgccgcgctttgcccgctggggctggcgttgctggtaggattttcaattcctgacagagtcatggaaggaaaacatccgcaattttttgtcgagatgacacaagaatcacttcagccaagccgctatattcttactgatagcgtcggtgttgccgcaggtctggcatggagcctgcaacgcgatgacatcatcatgtatcgccagacaggtgagttgaaatacggccttaattatccggatgcgaaagggagatttgtcagcggtgatgagttcgcaaactggcttaatcaacatcgtcaggaggggattattacactcgtgctttcggttgaccgcgatgaagatatcaacagtctcgccattccgcccgcagatgccatcgatcgtcaggagcgtctggtgctgattcagtatcgtcccaaatgatctggctaacattagtctttgccagcttgcttagcgttgccgggcagttgtgtcagaaacaggcaacctgctttgtggcgataaacaaacggcgcaaacatatcgcgctgtggctgggactggcgctggcttgtcttggtcttgccatggtgctctggctgctggtcttgcagaacgtaccggtaggcattgcctacccgatgttaagtctgaattttgtctgggtgacgctggctgcagtaaaactgtggcacgaaccggtatcgccgcgtcactggtgtggggtggcgttcattattggtggcattgtgatcctcgggagtacggtgtaatgggcctgatgtggggattattcagcgtcattattgcctcagttgcgcaattaagcctgggttttgcggcgagtcatctgccgccgatgacgcacttatgggattttatcgcggctctgttagcttttggcctggatgcccggatactgttactcgggctgctgggttatctgctttccgttttttgttggtataaaacgctacataaacttgcgctaagcaaagcctatgccttgctcagtatgagttatgtgctggtatggattgcttcaatggtacttcccggctgggaagggactttttcgctgaaagcactactgggagtagcctgtattatgagcgggttgatgctgattttcctgcccatgacaaaacaacgttactgagttttccgtgccactttacactgccgttcccactcatcggggctataactgcttgccgagaggactttcaccgtatgcagcttttcacgattaatacaatatagcgcattctgcaaaggcgagagtaaatcccccactttcacggcgaagtcactcttcacttcggcgatcatttttatcgcgccgccagcatcgcagagcataagtacatgtctgttatcttgtttattgcagcacgattttttgaccagccattccattgcattatcctgtttgctaagagttttcacatcaatttacagattaacagataaactctttatcaacggcaatggaatggcagaaatgagaagtgaaacggagggttaattattgctgacgttgcacccactcttttagcgcctgacgtgaaattttaataccgccgtttttcagttcaggcggcaacgttaaccaacgcaccggttgctgaaaacgggccagcttatctttcacccattcactaagatcaacgctctcgtggtcatactccatcaccgccaccggtcgatgaccaaactccttgtcggcaacggggacgataaacacctgcaaaaccgcaggatgtgcagcaattacgcgctcgacttcttccggctgaataccctctccgccactgaagaatagattgtctaaacgtccgacaatggtcagcttgccattatgcatctcaccgcgatcgcgcgtagcgtaccagccttcgtcattaaccagtgaaaccagttgcccgttacgccagtaaccttctgccatactggcagcccgcagccacacttcattattaacgattttcacttcccgacccggcagcggcgaaccaacgtctgccaggccgtcggcttctttcgcacacaccgtggaggcaaactcggtcagaccatagccgcaaaagcaacgaatcccctgctcgcgcgcctgttccgtcaactcgaccgggatagccgcgccgccaagtaacaccgctttcagggaaacggaactgcggttaaccagcaaacgccagagttgtgttggcaccagtgaagcgtgagtacagcctgccagcatttgctccaatggctgtttatcacgcaccgtcatccgcgcaccagcgtataaccagcgccacataattccctgaccggagacgtgaaacagcggtaaagagagcaaccagtcatcgtgatcgccaaacggaatcaacgataacaccccttcggcactggcaagatgggcctgataagtatggacagcggctttcggcaacccggtagaacccgaggtcaacgtcattgagcacagacgcgtcggctgccacgtagcggcatgtgcgccttcaacccgctgaatgtgcagcgacgttaacgccggaaacgtgttttccccatccggcaccagcgcaaattgcagcgtcagattgggcagcaattcttcaagcaacggttgcggcagctgagggttcacgggcaacacccgcgccccgcattgcagtaacgccagccaggcgagcagcgtttgcggcgtattccacgcccgcaacatcacgccgctgccctcaacaacgccctgcgccgcaaagcctgaggctaattcatcgacgcgagcacaaagctcgcgccagttaagttgctcgtcattaagccgtaaggcgatggcttctccccgcacttgccgccagtgacgccacggccagtcagagaagatcataacaaccgctccagtgcatcaacttccacgacaggcagcgtgctacccggccagcgacgtacctgctgcgcctgcatcagatccagcgtgtccagccctggaatggtgtccggcgttaaccaggcggcaatccgcgccagttgcgttaagcctaagctcgattcaatggaagaactgatcaccgccgtcagccccagcgcgtgcgccgcctgtacctgctcgcgtactttctccagactgcccgtgagcgtgggtttgataactaccgcacgcacgccctcttcagccacaaaggcaaaatccggctcgcgcaggctttcatcccaggcaatggcaatgccggtttcacgggcaaacgctcgcgaatcatcgcgggttttgcacggctcttcgagaaacgcgatgcggtggcgataatccgggttaacatatttggcaaactgctggcctttcagcggtgtccaggcgcgatttgcgtcaagacgcaaatgcagatccggaattgcctccagcaacagattaaccaccatgccgtcgcgcacggcttcgtacaatcccactttgaccttcgccactttctcgcctggcatatcagcaagtttgaggatcagatcgtcaggatcgccattacacagtggtgccgcacggtaattggccgcctgcgggagcgtatctgccagctccgccaatgcacagcttacgccaaaggcaacggaaggcatctgcggtagctcgcaatcgcctgccagccagttatttacccaggcaagcagcacgctttgcgcctcttcccaggtttcctggctgaagcccggcagtggggagatctccccccacccttcgcgctcgccctcacgcaggcaaacgtacagcccgtcgcgggtttttaaccgcctgtcgcgcagaaccacccccgcgtccatggggatctgccagcggtatacctgcgcgctacgcattacggattccgtttaaatttgctgaaatcaggctgacgtttctggttgaaagcgttgcgaccttcctgaccttcttccgtcatgtagaacagcatggtggcgttgcccgccagctcctgcagccccgcctgcccgtcacagtcggcgttcagcgcagctttcaggcagcgcagcgccatcgggctgttttgcagcatttcgcggcaccaacggacggtttctttttccagatccgccagcggtaccacggtgttgacaaggcccatatccagcgcctgttttgcgtcgtactgacggcacaggaaccagatttctcgcgcttttttctgcccgacgatacgagccatgtaggaagcgccccagccgccgtcgaaggaaccgactttcgggccagtctgaccgaagatggcattatctgctgcgatagtcaggtcgcacatcatgtgcagaacgtgaccaccgccgatggagtagccagccaccatcgcgacaaccggtttcggacaggtacggatctgacgctggaagtccagcacgttcaagtgatgtacgccggaatcatctttatagccgccgtaatcaccacgcactttctggtcaccaccggagcagaacgctttatcgcctgcgccagtcagaatgatcacgccgatattgtcgtcataacgcgcatctgccagtgcctggatcatctcttttaccgtcagaggacggaaggcattgcgcacctgcggacgattaatggtgatttttgcgataccgtcggtggatttttcataacgaatgtcctcgaaaccttcggagcagtcgtgccattcaaccggtgcgtaaagcattgcttcatcaggataaatcatattgtgtcctttagtcagaaacgcaagatctgcgccagacttgcgataacgccagcgggattttcccgatgcgcgttatgtccggcgcgaggaatgacatggcagtcggcagccagttccgccgccagggcgcggaatttgctgtcacgttcaccacataaataataaaacgcaaatgtgcgggcgctaaggttagcacgtaaatcaggctggacggcgagagaagtcgcctccagcatggcggcaagggttgcgccattattgttgctgcgcagcgccaccagctcccggcgttgatcgtcattgagcgaggcaaaaacaggctgttgataccagtcggcaaataccgccgttaacggttctgtgcgaaaacgctgcgcccattggcgatcggaacgctgacgttccgcacgttgttcagcattttgcagccccggatgcccgccttcgacaataaccccacaaagccccgccagcccctggcaagccgccatcatcgccacccgtccgccaagcgagtaccccaccagccagaagtcaaggatgttgtaactaaccaaggttttacgcagtaagtcggtgacatcatcaaatccatcgacgctaatcgccgccgaaccaccatgacctgggagatcaacatacaaccgtgagtagtcggcaaacgcctcgcccacttcttgccattcgtggcaatcgccggaaaaaccgtgcaaaaacaccagccagggtaaacctggttttccgtgttttgcctgcgcgtgcaggatcataaatggcttacctgcgccagaagttgctggagcgtttgcgcaccatcggtgtcgttaaccaccatttcaatcaccgtggtggttggcgtgcgccaggcgtcggcaaatgccgtttcaagttcctgccagttttgcggacgatgatatttcagctcgaacatcgcggcggcgtgctcaaaatggacgttttgcggcatcagatagaaacgctcacgctcgctttgcggcgttggcaacagcgagaaaatttgcccgccgttgttgttcaccacaattaataccagcggcgcagaaacctgacgcaataacgccagcgcgttgagatcgtaaagtgcggagagatcgcccacaatcgccagcgtcggtttgccgcttgcccgctgaacgcctgcggcggtcgaaagcagtccgtcgataccgctggcccctcggttgctgtacaccgggtaacctgccggaagttgcgaaagcgcatcaatcagacgtaccaccaggctgttaccaacaaacaattgcccctgttcaggcagatagtcgcagatgcgatgcgccagttgcgcttcgccaaacgcatcacggcgggcaataaccgcctgcattgcctgttccgccaggcgcgggatttcaacgcaccagggctggcgtttttctgccggatgcagctccagccagtcggcaatattggcaattaagcgacgtccgcgatggtgtgccggatcaagtcgcccttcaatgtcatcaacaatccagtactcttctggttcacagcttgcctgccattgcaggagccgtttgcccgtcaggctgcttcccagttgcaccacaatttgcgcctgctgcagctcgctggtcgctttggcattgcctaaccaaagatcggcacacggcagcggctgcccggtttgtgacagcacatcgccaatcagcggccagccaagagtttgcgcccacagggcaacttttttgccctcttccgcactcatgcgcccggcaaccaccacgccgcgcttttgtcgccagaagaaccagtcgcgctgtttttcactttccagacgaggcgcttcacgcagccacggtttgtcgtcctgccaccagtcacccagacgctgttgccagctaagcccggtatcgtccatttcgccatacagcggttcagcaaacgggcagttgatatggactccccccgcatgaagcgtaccgagagcgtggtcgatggtagaaaccagccaacgtgcggggatatcccgggtcgggcgcggcaatgaaatactgtgcgtggggtgagaggcgaacattcccggctggcgaattgcctgattcgcgccgcagtcaattagctccggcgggcgatcggcggttaacaggatcagtttttctccggttaacccagcttcaatcagtgccggatagagatttgctaccgccgtgccggaggtcacaatcaccgccaccggctgcttgctgactttcgccagccccagcgccagatgtcccagtccacgctcatcgaaatgggtgtggtgaatgaatgtggaattctccgccgccgctaacgttaacggtgtagaacgcgagccaggggcgatacagatgtgtctgacgccgtgacgcgttaatgcttccagaatgaccgccgcccagcgtcggttaaatgcgcttactgacatgagtttgtccggtatcaatattgcggctaagtataaggagctacaaaaatagattattgatatgaatcggtaatgatgcgactcattactattccatctgtaataaagtacgcagccctgccgctttgttgtcgatttcctgccactcttgctcggggtcggaaccacggacaatgcccgcgccagcatataatcgcacgacattgccgctaatttttgctgagcgcagggaaacgcagaattcgctttgttgtaatgagagatagcccgcagaaccggcgtaccattctcgggtgaacggttcgtgacgggcgataaactgtcgcgccagatcgcgcggtaagccagcaactgctgccgttggctgcaactgatgtaaacagatcacatcatccgctttgttgagtgaagtccagatacagcggcgaagatgctgcactttacgcagacgcagtacctgcggcggtaaaacatccagcgtctgggtatcggcctgtaatcgttggcagatatcttccaccaccaacatgttctcgcgctggtttttatcatccgccatcagccactcacctaaatgctgcgcctgcttatcatcaggatgatttgctaccgttcccgccaacgcttcagtacgcagcgcgttgtcacgccgccgccataaccgttcaggtgaagagccaagaaaagcattttcgccatcaaaggccatgtaaaaatggtagcaattcagattcagtcgacgactggcagccatcattgctgccgcattgaccggacttgcgaaatgcaagtcagttgcccgagcaagaaccactttgtcgagctcaccttcggcgatggttttcgttgccagttcgattaattgcgtccagcccgttttgtccggccagtgttgttctcgcgtggtggttaaatgtaatccaggcaaaggcttgatactcaccagtgcggcgataaattcttttgccttgattgcatcgtgctgaagggagctttcgctgaatagcgttagccgcagcgtggctttaccgccacaacgtcgccattccaggcgtggtaaaagtaaattgccctgcgacgggtcaaacgcattcagcccccagatgcgtaagtcggcgtgttccgggtgctggcgaagaaaacgttgtgcctggtccaacgacgtaaaacgggtaatcgcgcccaggacggcagcttcttcatcaccattacgttgttgccagtagaattgcgggtacgtttgctgactggccagccagctcaaggcatcaaaagcgtctttgagagggaaaggaatatcgataacccgaatgccgggtgtcgccggaatctcttgcgacaaatggcgcagtagattttccagcgccgtagtaagtgattgcacgcggacctctccctgttaaaagcctcacattatacggggtactacaaaaaaatgcagtaccccggtgtagggaggttttaacggcgtgccagcaacagtcctagtaccagcccaacggccgcgcccacaccaattccttgccagggtttttcgtggacgtagtcatcagcacgataaactgcctgcttcgcccgatagtaataactgtctgaagcctggctaacccgttttttcacatcatccagcgctttttctgcacgcgctttcagctcaacatatttctgatcggcgggatcgccagaggagcggagcacctcttccagtgtttcactaagcagcgtcaggtcgtcatcgatacgtgtatcaccaaactgattagacattctcgttctccatttgcgtaaaacctgtcactaactatagacaagggttgttgattacgcctgaattacctcgcgtgccatcccaatgtgtgggataccatcttcttcatagacctccgtcacagggataaaaccgaaactctggtagaagttttgcagatgcgcctgcgccccgaggtaaacaggcttatcaggccagtgatgcgtacatgtttcgagtgttttactcatcagttgctgccccactttttcgccacgcaacgcttcactgacaatcacccgacctataacgaccggctcaagatcatcatcacttttcagaatcctcgcatatgccaccagttcatcatttttccaaccaagaatatggcgattatcccccgtcaaatcatcaccatcgatatcctgataagggcaattctgctcgacaacaaacaccgcgcaacgcagttgtaataaggcataaagctgggaaaccgataattcagagtgatgcagatcttgccattcaatcataatgctctccttttagatgtatgccttatactagccggaatattttttgaaacgtgatgaactcatggaattaatttttttaggtacttcggccggtgtgccaacccgcacgcgcaatgtcacggcaatattgcttaacctgcaacatccgacccagagcggactttggttgtttgactgcggtgaaggcacccagcatcagctactgcataccgcctttaaccctggaaaactggacaagatttttatcagtcaccttcatggcgatcatctttttggtttacccggcttgctgtgcagtcgttctatgtcaggcattatccaacccttaacgatttatggtccgcaaggtatccgtgaatttgtggaaaccgcgctgcggattagcggctcatggaccgattatccgctggaaattgtcgaaattggcgctggcgaaattctcgatgatggcctgcgcaaagtaaccgcttatccgctggaacacccactggaatgttatggctatcgtattgaagaacatgataaaccgggtgcattaaatgcccaggcattaaaagctgctggcgtgccgcctggtccactgtttcaggaattaaaagcgggcaaaacaatcaccctggaagatggaaggcagattaacggcgcagattacttagctgctccagtgccaggtaaagcgctcgctattttcggcgataccggcccctgcgatgccgcacttgatctggctaaaggtgtcgatgtcatggtgcacgaagcgacgctggatataaccatggaagccaaagccaatagtcgcggccatagctctacacgccaggctgcgacactggcccgtgaggctggagtcggtatgctaatcattacccacgtcagctcgcgctatgatgacaaaggttgtcagcacctgttacgtgaatgcaggtcaattttcccggcgactgaactggcgaatgatttcaccgtgtttaacgtttaactctgcttattattaaaaacagggcgaaacttgccctgttatcgcaacccgcgctacatatatccacccacacgggcatattgagcgatttttgatatttattcatctcctcacgcactatattcagagcaataagttgcctctatttatcttgattcagcacaacctttgcaactaaaaggagcccatgatggttacagttgtcagcaattattgtcaattatctcaaaagcaactcagtcagacatttgcagaaaaatttactgtgaccgaggaattactgcagtctttaaaaaaaacagcgttatccggagatgaagaaagcattgagttactgcataatattgcgttaggttatgataaatttggaaaagaagctgaagacattctttaccatattgttagaaacccaacaaatgagaccctatcgattatccgacttatcaaaaatgcttgtttaaaattatataatttggcacataccgcaaccaacttcccccttaaaccaactggtccggataattcagatgttctcctgttcaaaaagctattctccccttcgaaattaatgacaattatcggtgatgaaattcctcttatatctgaaaaacagtcgctttcgaaggtgcttttaaatgatgagaataatgaactgagtgatggtacaaacttctgggataaaaatcgtcaattaaccacagatgaaatagattgctatcttcagaagatcgccgctaatgcaaaaaatactgaagtcaattatcctactggtctctacgtcccctactccaccagaactcacctggaagacgctctcaatgaaaatattaagagcgatccatcatggccgaaagcagtccagttattccccataaatactggcggacactggatattagtttcgctacagaaaatagtaaatgaaaaaaataatacacaacaaataaaatgcgtcatattcaactcattgcgcgcactaggccatgataaagaaaattcacttaagcgtgtcattaatagttttaattctgaattcatgggagaaatgtcgaataataatataaaagttcatttaactgaacccgagataatatttttacatgccgatcttcagcaatatttaagccaaagttgcggtgcatttgtgtgcatggcagcccaggaagtgattgaacaaagggaaagcaattctgacagcgccccctatacgttattaaaaaactatgctgacagatttaaaaaatattcagcagaagagcagtacgaaattgattttcaacatagactggtaaacagaaattgttatttagataaatatggcgatgcacgaatcaatgcttcttatacacaattagaaataaaacactcacaacccaaaaatagagcatccggcaaaagagtgagttaacatcattgttaattaattcgaccagtcagcaaatatgctgactggtcgaacatagtttgctaaacagtcatcactgactgatgtcagtcacaccatccgccagttcaatcttcgggtatttccagcgtatctcggcacgcgattgctggtctgttgatgtagtggattgttgttgctgacttttcttaccctcagagttctgccccctgtcaactcaatctgccaataaataacataattatatttttccttatatgaattcctttttaaaatagcgaagccactgtaaaagatactttttgtatagatctaacaaccgtaataaaacaaacactcataactcattataaataatgataaaataacgtcttttattgataatttatatatgaaaaaaaatccttttgttatattatttctgatttcactccctctgattatttttaccaaccctgggtcactgcattatcgccaacgccccgacacgtcagtcctgagcaattagaaaaaacagttcgttatcttacacaaactgtgcatccacgtaatgccgacaatattgataatctgaataggtccgtagagtatataaaagagttctttgtcagtagcggtgccagagttaccgcgcagggcgtccccgattggctattacgactctgcgcctggtagccaggattacccttacccgcaatgtcctggctttatcccgatcggggggactttattgcctggtcggcagaatacaggatatcaacgccgttcgtcaggtaaaaacggcattgttatcatcccgggatttatctgtttattctatgaatgccccatggtttattcccggtattgatttctctgaccacctgaattattggcaacacgatattcccgccgtaatgattactgacaccgctttttatcgtaataaacaataccacttgcccggtgatacagcagacagattgaattatcagaaaatggctcagatggtgttataaccttgttacacaacagtaaataataaaaatttctcgaggcgggtccagaaacagcgacatgtacattttattttccctcgtctgttttaagatgcgaaacataaaattcaatggaggaaaaataaatgggaatgattggttattttgcagaaattgactcagaaaagattaaccaactgcttgagtctactgaaaaacctttgatggataatatacatgacacgctttcaggattacgccgactggatattgataaacgctgggattttttacactttgggctgacaggcacctctgcttttgatcccgcgaagaatgatccgctgagtcgtgccgtgcttggtgaacacagcctcgaagatggcatagatggcttcctgggattgacctggaatcaggaattagccgcgacaatcgaccgactggaatcactggatcgaagtgagctgcgtaaacagttttccattaagcgactcaatgaaatggagatttatccgggagtgaccttttcagaagagttagaggggcaactctttgcctcgatcatgcttgatatggaaaagctgattagcgcgtatcgacgtatgctgcgacaagggaatcatgcgctgacggttattgttgggtgatggtgtcagagcgccaaaaaaaaccgccgaacatgtcggcggctttctgacttacaaactaacagattacatcagcggcattgctaaccgcacaatactaatcagcggttgtggccatacacccagcaccagtaccaacagtgcagaaatcagcaccacgataccgcccgcgctgtactgccagtttgacggtgcatcgcgacccggttgttccggtgcgtgcaggtacaggctcaccgccacgcgcaggtagtagtagaggccgattgccgaaccgacaaccacggcacccaccagccaccacaagtgtgcctggacaccgaccgccagcacgtagaacttaccgataaagcccagcgtcatcgggataccggccagagacagcatcatcaccgtcatcactgccgcgaggatcggacgatgccagaacagaccgcggtaagagaacagggaatcagcatccgggccacgatacgggctggacatcaggctgaccacgccgaacgcgccgaggctgctgaacagataaccggccagataaacccctaccgcttccatcgacatctcgccggtttgcagcgcaatcagcgctaccagcagatagccgaggtgagagatagatgagtaaccgagcagacgtttgatattggtctggctcagcgccatcaggttaccgaagatgatagaggcaaaggcgataatcgccagcactacccgaatcgcttcgctgtcacccaccggtgcgtagaggaacagacgcatcaccacaccgaagatagcgattttgctcgccgtcgccaggaaagtggaaaccggcgcaggcgcgccctggtatacgtctggcgtccacaggtggaacggcaccagagagagtttgaagccaaggccaacaatcatcaggccgaaacctgccagcaacagcggctcgttgagcataccgtcgccgaggtttttacccagcgcgacaaacgacaggtcgccagactgcgcatacaccagcgccataccgaacagcaggaaagaagacgctgcggcagaaaggatagtgtatttgatactggcttccagcgaacgtttctggcggaaagcgtaaccgaccaggccaaacagcggcaaagagatcagttcgataccgaggaacagagacgccagatggttggcattcgccagcaggatcccgcccagcgcggcaattaacaccaacaggtagaactcatccttgttgtcgttatagccttcaagccacgggtaggcgaaagtacaggtggcgaggctcgccaacaataccagcccggtgtaaagcatggcgaaaccatcaacgcgcatcagcggcgtaacgtccatagcgcccgcctggccaacaaaccagagcgaaaccagcgccgcgttaagcccaataaccgagagcgtagcgttgaggaaatgattgcgtcgccacgcaatggagagcatcacaaccaccaccgtcaagccgacgatcagcaacggtagcagtgcgatcaggttttgtggagttattgtcatggcgatttacggccttgtagtagtaacggaattaacaaaccactgctggatattgccaatcgcggagtgcgaggtatccagaatcggctgcggatagaagcccagcagtaccagcagcaccaccagcaacaggatcataaacagctcacgcagcgacatccctggcagttcctggctggcaatctggcttttcgctttaccgaagtaagcgcgatgtaacatcgccagcgaataaacagatgcaaagaccagcccaaaggtagagataacggtaatcaccgggacaacctggaagctgccgaacagaatcataaattcgccgacgaagttaccggtgccaggcatcccaagcgttgccaccgcaaagaacagcgacagtgctggcagccatttcatcttgcgccacagaccgcccatcatgcgcatgtcgcgggtatggatacgttcataaagctgaccacaaagaataaacagacccgccgccgacaaaccgtgcgcaatcatctggattaccgcgccctggtaggccaactggctgccggtgtagatagcaatcagcacgaagcccatgtgggaaaccgaggtgtaggcgatcagacgtttgatatcggtctgggcgaaggccatccacgcaccgtagaagatgccgataacacccagccacatagcaattggcgcaaactctgccgatgcgttcgggaacagcggcagggagaaacgcagcaaaccgtaagcggcagttttcagcaagatccccgcgaggtcaacggaaccggcggtcggagcctgagagtgcgcatccggtagccagccatgcagcggaaccaccggcattttgactgcgaaggcgatgaagaagcccagcattaacaggtattccacaccactggacattggcgtattcagcagctcttcatagttgaaggtccagacgccggtcgcattgtagtgaacaaaaaccagcgccaggatggcaatcaacatcaccaggccactcgcctgggtgtaaatgaagaacttggttgccgccgtgatacgcgttttaccgtcagaggctttatgcccccacagtgcgatcaggaagtacatcggcaccagcatcatttcccagaagaagaagaacaggaacatgtcgatggcaaggaacacgccgataacgccgcccaggatccacatcaggttgaggtggaagaagccctgatatttttcgatctctttccacgaacatagtaccgccagcacaccgagcagaccggtcagcacaaccatcagcagcgacagaccgtcaatggcgagatgaatagagataccaaaacgcgggatccacggcatgtcgaattcagactgccactgcggaattccggcggattgcgtcagtgaataaccgccctgcaaccacagttgcagcgacagcgccagcgtcaatcccatggtgatcagcgcgatccagcgcggcaccttgacgccaaagcgttcggtctgccagcacaggaagccgccaataaagggaattaatattagccagggtagtaacatggcgatctttattccttgtaaaagtcccgtcaggaccggattttcaacgaattctcacgacagaaaattctcttcggactgggggtagtgtcggatgcgccgcgaaggcagcttatccgacctacgttcttatatgcccaggggcaatcccacaatccttaactcaacgcagtaccatcaacagtgccagcaccacgaccgcaccgatgctcatggatgccacataccagcgcagataaccgttctcgcttaacagcagacctttacctgcaaagcgggaaagaaccgccgggatgttcatcattgagttcagcggatcgcgtttcagcaaccaggcaatacccaggaacggcttgacgaacactttgtcgtacagccagtcaaagccccaggcgttgtaccaccaggtactcagcaggcggcccggcgcactgttggcgatggaggtcaccagagtacgtttacccagccacagccaggctgccagcagaatgccgaccaccgcgaccacgccagaggtaatttccagggtcaacatgctgccgtgcgccagttccgtcgtttgcggaagcacgccctgcagcggcggtacaatcagtgcgccaacgaaggtggaaaggatcagcagcacaatcagcggcaggctgtgagttacccctttcacggcgtgagcgtgaatttgttcttttccgtggaagacgatgaaaatcatacggaaggtgtagagcgaggtcataaacgcaccgaccagacctgccaccatcagattgatatgaccattcgccatcgcacccgcgaggatctcatccttactgaagaagcccgcagtgaccagcggcagtgccgacagtgctgcgccgcccaccaggaagcagagataaaccagcggaatagatttacgcagaccgcccatcttgaagatgttctgttcgtgatggcaggccagaatgacggaaccggatgccaggaacagcagcgctttaaagaacgcgtgagtcatcaagtggaaaatcgccgcatcccatgcctgcacgccaagcgcgaggaacatgtagccaatctggctcatggtagagtaagcgagaacacgtttgatgtcggtctgtaccagcgcggcaaaaccggccagcagcagcgtaaccgccccgacaatacccaccagatgcagaacttccggcgtcatcaggaacaggccgtgggtacgggcgatcaggtagacacccgcggttaccatcgttgcggcgtggatcagcgcggagacaggcgtcgggcccgccatcgcgtcagcaagccatgtctgcaacggcaactgcgcagatttaccgaccgcaccgcccagcagcatcagcgtcgcccacatcagcatgttattgccgtcagcaaagtgcgctggtgccagttccaccatttcgcggaagttcagggtgcccagttcgttgtaaagaatgaacagtgcgaaagcgaggaaaacgtcacccacacgggtcacgacgaacgctttcattgccgctgcgccattcttcggatcggtgtaatagaaaccgatcagcagataggagcacaggcccacgccttcccagccgaggtacatcagcagcaggttatcggcgagaaccagaactaccatgctggcgatgaacaggttggtgtaggcgaagaagcgagagtagccctcttcaccgcgcatgtaccaggaggcgtacatgtgaataaggaaacccacaccagtgaccaccgagagcatggtcagcgacaggccgtccagcaccaggttaaaaccgatgttaaagtcgcctaccgacatccacgtccacagcggctggctgtatgcctgctcgccgttagcgaagaaatcaacgccgataaaggcggttaccagcgccgccaggcccacagagccaacgccgacgatcgccgaaacgttttcagaccagcgcccacgggagaacgccagcaggacgaagccaatcaatggcaaaataatggttaaggcaagcatgttcatccgcgcatctcacttactgaatcgatgttcaggttctggcgacgacggtgaagttgcagcagcagcgcaaggccgatactcgcttctgccgccgcgaggctgatggcgagaatgtacatcacctgaccgtcggtctgaccccagtagcttccggcgaccacaaaggccagcgcggaggcgttaatcatgatttccagaccaatcagcataaacagcagattgcgacggataaccagaccggttaagccaagaacgaataagattgccgcgaggatcagtccatgttgtaaggggatcatgcgtgctcctccgtttttcttttcgcgctgtcgtctttacgattgctcagcacttcacccgcacgctcttcacgaccgacgtggaaggccacaaccagacccgcgagcagcagcatagaagccagttccaccgccagtacgtaaggcccgaacagcgtaatacccactgctttagcactgattggcgtaccgtcgataccctgatcattaacaccaaggatggcgtaaacaatcaccaccagcatgatggccgacaaaattgccggaccaatccacacctgcggtttcagccactggcgttcctgttcgatttctgaaccgcccaggttgagcatcatcaccacgaacacgaacagcaccataatggcacccgcgtagacgataatttccagcgcaccggcgaagtaagcgcccagtgagaagaacaccccggaaatcgccagcagcgaaataatcaggtacagcagtgcgtgtaccggattggtatgggtgatcactcgcaaggtcgcaagtatggctatcaggccacagatataaaaagcgaactccattgcccctctccttacggtaacaggctcttgacgtcgataggcttggcttcgttctctgcttcgcccttatctttgccgtcgattgccatacctgccatccggtagaagttatattccgggtatttgcccggaccggagatcagcagatcctctttctcgtaaaccagatcctggcgcttgtattcccccatttcgaaatccggggttaactgaatcgccgtggtcggacaggcttcttcgcacagaccacagaaaatgcagcgtgagaagttgatgcggaaaaattccgggtaccagcgaccgtctttggtttctgctttttgcagcgagatacagccgaccgggcaggctaccgcgcagaggttacaggctacgcaacgctcttcgccgtccgggtcgcgggtcagaacgatacgaccacgataacggggcggcagatagaccggctcttccgggtacattcgcgtttcgcgtttggcgaacgcgtgcaggccgatcatccagatactacgaacctgggtgccgaaacctactaacaattcttttaaggtcatggtcttattgccccttattgcgcctgccagagaatgacagccgccgttaccagcaagttgatcagcgtcagcggcaggcagattttccagccgaaggacattacctggtcataacgcggacgcggtaacgacgcacgaatcaaaatgaacatcatcataaagaacgcggttttcagcgcgaaccagatgaatggcggtaacaacgggccttgccagccaccgaagaacagcgtcaccatcaatgcagagatggtcacaatcccgatgtactcacccacgaagaacagaccgaacttcataccggaatattcaatgtggtaaccatccgccagttcctgctcggcttccggctggtcaaacgggtgacggtgacataccgccacgcccgcgatggcaaaggtaataaaaccaaagaattgcgggataacgttccacacatgcgcctggctgttgacgatgtcggtcatgttgaatgaaccggcctgcgccaccacgcccatcagggaaagcccgaggaacacttcgtagctcagggtctgcgcagaagcacgcatcgcacccagcaacgagtatttgttgttacttgaccagcccgcaaacagcaccgcgtaaaccgccagacctgccatcatcaggaagaacaaaatcccgatgttcaggtcggcaaccacccaacccggactgactggcacaatcgcaaaggccagcagcagcgaggtaaaggcaatcatcggtgccagggtaaagatgacgcgatccgagaatttcgggatccagtcttctttaaagaacattttgatcatgtccgcaaccagctggagcgaaccgccccagccaacacggttaggtccgtaacggttctggaacagacccagcaggcgacgttcgccaaagctcatgaatgccccgcaggtgacaaccaccagcaggatcaccaccgctttgaggatggtcagcaggatctcaatcagttccggtgatatccaactcattgttgtgcctccttgagatcctcaagatgcgcgccagccagcaccggagcaataccggacatacccatcggcaagcccacctgccctgccgtcagcccttcagcgatttcaaccggcagcgtgaccgtgttgccatcgtaactaaaggagacgtgtgtacctgcgttcacacctaacttcgcggcatccgctgggttgagtttgatgtacggctgcggcatacggctctggaagaccggagcacgctgtgacaattcatcgctgccaaacaggtggtaatacggcgcgatacgccatttcccgtcctgcggctggaagcgtgccggtacgctggtgaagtaatccagaccattttcgctggtttcaaacagacgcacgcccggatcgccaaagcgcagtttgccgcccacttcgtcctggaatttgttccacgcctgcggggagttccagcccggcgcccaggcaaacggcacttgcgaacggtgcgcagtcggctggttgttaccttccatcgagaaggtgaacatggtgtcaatatcctgcggctgacgcggctcatgaacgctgatattggcgcgcatggcggtacgaccgctgtaacggtgcggttcacgggccagtttctgcccacgaatacggaatgtcgcatccggcgcagcatctttgatacctgccagttccgggattttcgccacaacagcgtcaatcacatggtcgagctgcgtccagtccacttcacggctcagcagggtgctgtgcagcgagtgtaaccagcgccagctttccagcatgacagttttgctgtcgtaataagcaggatcgtaaacctggaagaaacgttgggcgcggccttcgttgttgatcaccgtaccgtcgctttcagcaaagctggcagcagaaagtaccagatgggcgttttccataatcgctgtgcgttgatgatcaaccaccatcaccagcggcgctttagccagcgcagcattcacgcgggtagcggaagcgtgacgatgcagatcgttttccagcaccaccaccgcgtcggcgcgtccggtttccagttcggtcaacgcttcttcaagcgaaccgccacccataatgcccagccccatgctgttgacggaacgggcaatcatggtgataccaacgtcagcgccgcgacctttcagggctttcgcgacgttagccgcagcctgaatcacctctatgctaccggcgttcgtcccggagataatcaacggtttcttcgcacctgccagtgcctgcacgatgacgtcgattttgctttgcagctcaggttcgataccgtcaaccgctggcgcagagttatccagcgcatgggcgatggcaaaacctaaacgcgcctgatcttcaaccggtgcgcggtaagtccacgccgcgatatcatccagacgggtgtcatcaacgttggtaacaaacagcggatgcttcgcacgttgaccgatgttgaggattgccgcaatctgccagtcagccactttctgtgctgccgccatttcgcgcgctttacctttcacagcctgacgcactgccagcgcgacgcgcgcgccggtctgggtaacgtcttcgcccagcaccagtaccgcatcgtaagattcgatttcgcgcagagccggagtataaatgccgccttcacgcagcactttcagcgccagttgcagacgttcctgctcaccgtgagcgataccggtgtagaagttttcttcgcccaccagttcacgcagcgcaaagttgctttccacgctggcacgcggagaaccaataccgatcactttcttcgactgacgcagaatatctgccgcgccctgcattgcctgttcggcgttgagggtaatgaaatcatcgccacgacgctgtactggttgacgcggacgatctttcaggttgacgtaaccgtaaccgaaacgaccacggtcgcagaggaagtagtggtttaccgtaccgttgtaacggttttcgatacgacgcagttcgccgtaacgttcaccggggctgatgttacagccgatggaacattgctggcagatgctcggcgcaaactgcatatcccatttacggttgtaacgctcggagtgcgttttgtcggtaaatacgccggtcgggcaaatttcgaccaggttaccggaaaattcgctttccagcgtgccgtcttccgggcgaccgaagtagacgttgtcgtgcgcaccgtaaacgcccagatctgtaccgtcagcgtaatctttgtagtaacgcacacagcggtagcaggcgatgcagcggttcatttcgtgagagatgaatggccccaaatcctgattacggtgggtacgtttggtgaaacggtagcgacggaagctgtgtccggtcatcacagtcatatcctgaagatggcagttaccgccctcttcacataccggacagtcgtgcgggtggttggtcatcaaccactcgaccacgctttcacggaactgtttcgcttcttcgtcgtcaatggaaataaaggtgccatcggaagccggtgtcatacaggacatcaccaggcgaccacgcgtgtcttccgcgttttggtattgcttcaccgcacactggcggcaagcaccgacgcttcccagcgccggatgccagcaaaagtaaggaatatcaaggcccagagacagacaagcttccagcaggttgtccgctccgttgacctcgtattctttgccgtctacatgaattgtagccattagcatgcttccagttttctcggtcagggaccgagcgttaatcgaaattcggttaccagcgctctttcagcaggttcggctgaatcccattaatcaaatgggtattgctgaacggctgtttgattcccgcctcaaattcttcgcggaaatatttgatggcgctctgtaacggctccactgcaccaggtgcgtgggcacagaaagttttacccgggcctaagaatcgacacagttgctcaagtgtttcgatatcgcccggctgaccttcaccacgctccagcgcacgcagaattttcacgctccacggcagaccgtcgcggcacggcgtacaccagccgcaggactcacgggcgaaaaactcttccaggttacgcaccagcgacaccatgttgatctcatggtcaaccgccatcgccagcgccgtacccagacggcttcccgctttaccgatactttcgaattccatcggcaggtcaaggtgcgcttcggtcaggaagtcggtgcccgcgccgcctggctgccaggctttgaatttcagaccgtcacgcataccaccggcgtaatcttcgaggatctcgcgcgcggtagtaccaaacggcagttcccacagtcccggatttttcacccgaccggagaagcccatcagcttggtgccagcatctttacttttcgagatgttctgataccactccacgccgttagcgaggatcgccggaacgttacacagggtttcgacgttgttgacacaggtcggtttgccccatacgccggaggttgccgggaaggggggtttcgagcgtgggttagcacgacgcccttccagggagttgattaacgctgtttcttccccgcagatgtagcgccctgccccggtatggacgaacagttcgaagtcgaaacctgttcccataatgtttttgccaagcaagcccgcttcagtggcttcggcaatggcgcggcgcagatttactgccgcttcgatatattcgccacgcaggaagatgtagccacggtaagctttcagcgcaaacgcggagatgagcataccttccaccagcaggtgcggcagttgctccatcagcaggcggtctttataggtgcctggctccatttcatcggcgttacacagcaggtaacggatgttcatggattcgtctttcggcatcaggctccatttcaggccggtagaaaagcccgcgccaccgcgccctttcagaccagcgtcttttacctgattaacgatttcgtccggagacagcccggtcagcgccttacgcgcgccttcgtaaccgtttttgctgcgatattcgtccagccacactggctgtttgtcatcgcgcagacgccaggtcagcggatgcgtttcgggagtacggataatgtttttcatttataccgctccagcagttcagggatcgcttccggggtcagatgcgcgtgagtatcctcatcgatcatcatgtttggccctttatcacagttccccaggcagcaagttggcagcagcgtaaagcgaccgtcaaatgtcgtttgccctggtttgatgtttagctttttctcgagcgccgcctgaataccctggtaaccgttgatatgacagaccacgctgtcgcaataacggatcacatggcggccaaccggctggcggaagatctggctgtagaacgttgccacaccttcgacgtcgcttgccggaatacccagcacatcggcgatcgcgtggatcgcaccatccggcacccagccacgctgcttctgaacgattttcagcgcttcaatggacgccgcacgcgggtcttcgtagtggtgcatctcgtgctcaatcgcttcacgctctgccgcactcagctcaaaagcctcggtttgtggttgttgattctcgtgcataattagcggtccacatctgacataacaaaatcgatactgcccagataaacaatcaggtcagacaccaggctgccgcggatcgccgccggaatttgctgcaaatgcgcataactcggcgtgcggatacgagtgcgataactcatggtgctaccgtcgctggtcaggtagtaactgttgatccccttggtcgcctcaatcatctggaaagattcattggcaggcatcaccggcccccacgacacttgcaggaagtgggtgatcagggtttcgatatgttgcagcgtgcgctctttcggcggcggcgtggtcagcgggtgatccgctttgaacgggccttccggcatgttgttgaggcactgctcaagaatgcgcagactctggcgcagctcttccactttcagcattacgcgggtgtagcagtcagaaacaccaccaccaaccgggatttcaaagtcgaagttttcatagccagaataaggacgcgccttacgcacgtcgaagtcgatcccggtagcacgcaggcccgcgccagtggtgccccactccagcgcctctttcgcgccataggcggcaacgccctgggaacgacctttcagaatggtattttgcagcgccgctttctcgtaagacgccagacgtttcggcatccagtcgaggaactcacgcagcaggcgatcccagccgcgcggcaggtcgtgcgctacgccgccaatacggaaccacgccgggtgcatacggaaacccgtgatcgcttccaccagatcgtaaattttctgacgatcggtaaaggcgaagaacacgggcgtcattgcgccgacgtcctgaataaaggtcgagatgtacagcaggtggctgttgatacggaacagttcggagagcataacgcgaatgacgttaacgcgatccggcacggtgatcccggccagtttctctaccgccagcacgtaaggcatttcgttaacgcagccgccgaggtattcaatacggtcggtatacggaatgtagctgtgccaggactggcgctcgcccattttctccgcaccacggtggtggtagccgatgtctggtacgcagtcgacaatctcttcgccgtcgagttgtaaaacgatacggaaagccccgtgcgccgacgggtggttcggaccgaggttgaggaacatgaagtcctcgttttcggtgccgcgcttcatcccccactcttccggtttgaaggtcagggcttccatctccagatcctgtttggctttggtcagctcaaacggcgagaattcggtagcgcgcgccgggtaatctttacgcagcgggtgacctttccaggtttgcggcatcatgatgcggcgcaggttcgggtgaccgtcgaaagtaatgccaaacagatcccaggtttcacgctcataccagttagcgttcgggaacagtttggtgaaggtcggtacgtgcaggtcgttttctgccagcgccaccttcagcatgatgtcgcggttacgatcgatagaaatcagatggtagaaaacggaaaaatccgcggcaggtaacccttcgcggtgtgtgcgcagacgttcgtccatgccgtgtaagtcaaacagcatgacgtaaggtttcggcagtttctttaagaaatcgccaacttccagtaattgttcacgcttgatccacacaacgggaaccccggtgcgagtcgcctgaacagtaaaggcatccggcccaaaacggttgcgcagttcgccaatcaccggatcatcaagatgatcgcgggtctgccaggcgggttcttgcgcggttaagtcggtcatattgttcaccattgcaaatggtccgtggtgactgtcggcgcagtaagcttcgcgaaatagatttaggaataagcgaagaaaaatccctttgccgacaggcgcaaattaaatctcgtcaggtgtacgcaggttggttacggcaatgcgttcaccgcgcttgcgttcgcgctctgattgcatattggcgcgataaacgccctgatcgccaaccacccaggagagcggacgacgttctttgccgatagattcctgcaacagcatcagtgcctgcatgtacgcttcaggacgcggcggcagcccgggatatacacatcaaccgggatgaatttatcgacgccctgcacaacggaataaatatcgtacataccaccagagttggcacaggcacccattgagataacccattttggttccagcatctggtcatacagacgctgaataaccggtgccattttggtaaagcaggttcctgcaaccaccatcaggtcagcctgacgcggcgaagcacgcaatacttctgcgccaaaacgcgccacgtcatgcaccgcggtaaacgaagtcaccatctcaacgtaacagcaggaaagaccgaagttatacggccaaattgagtttttacgaccccagttaaccatgtcattgagcttgcccataaacacgtttttgttaacttcttgctccagagggtcggttacgatctcctgcttttgcagggggtaacggtcgttctcaccgttgggatctatgcgggtgagcgtataatccatcttaatgcctcgcggttagcgttgacgattagcgatactgttcgtttccgggttcatacgctcgcggcgtgaacgcgcgggcgtccagtccagcgcgccaatacgcaccagataaaccagacctgccagtaacacaaaaataaaaattgcagcttccacaaagcctacccagccgctttcgcggatagaggttgaccatgcgaacagatacagcgcttcaacgtcgaagataacgaagaacatggccaccagataaaacttggcggacaggcgtaagcgggcggagccgaccgagtcgataccggattcaaacggcacgtttttcgacctcgcgcgtgcgcgaccgcctaaaaaccaaccgcctaccagcatcaggcaacacaggccaatggcaacgataagaaagatagcgaatgcccagtgatgagcgatgacttcagtggatgttgacatactcattgcttactcatcaaaagtagcgccagattcactgctcttcacggcagatggacgccacatcgattcatggggaggaataaaaaaaaccttacaatcactgtagaaattcttttatacagctaattgatgtggtcttttactcctttctataaccttttgtcaactttaacaaaagtttcttcacattagtttacataatatcaacaccattagcatttaatgccctttcaccccagatccttgacgactccaggataattagatgttgttgaatcgtgtccgttgtgaagcaatggaaaaaatacgggtctattttgacaggaatttgtgtcgattcctccccccaaaagagagtattttcttgatctgtgacacgcttttgtcattccataacaaaaacgcagcaacaaatttacgtattttttaacatcattgtagcaggtgatttttttcaggcgattatttgtgcgttcgggacgtgaatctctggtgattgaaaaatgaacagttttgtacgttctgcactatgcgaggaaggatttttactaaaaaaaagccgctggggtttaaaacacccccagcggctcgttttttacactattgtctcaggaattatctatcgtccgtcgattactcgatatccctttcaatcaacaatgaatcatccccttccggagcagacattgggctgtattgccacggattatggtagctctccatcgcctgatagatcacctgggccagctcattattactggacgggtcatagcacagcaaatattcggtatcaggtagcggcggtaagccatctactccactcagcacacgcaggtccgggctcatcatctcaaccggccttgccgtcacgccaagaccggctttcactgccgcacgaacggccggaagcgtcgaggcgacataagccagtcgccatggaatatctgctttattaagcgtcgccagcaccatatcgcgaaacggacttggatcatccagcaatacaagagggatcggctcgcctttttgcaatacgtattccgctgcgcagtaccagtgtgttggcgaggttcgcaggttcaatgccttaaacgctgaaggacgatgggtggttaccatcaaatccacttcctgggattccagcatttctgccatataggcattacgtttaacgcggacatccagcgctaatttcggataaaccgaactcacgcgatttaacaggaaaggtaagatcgtatcggcagattcatctgaagcaccgatagttaacacgccctgaagattactgaacattaatgatgagcaggcctcatcattaaaacgcaggattttcctggcgtaaccaagaagttgaatgccatgttcagttaacagtttgttgcgaccgtgacgagcgaacagttctttcccaacgagttgttccagacgctgcatttgctgacttacggcggactgagtacgacacacagcggcagctgcggcagcaaaagtgttcagatcggcaacagcaacaaatgttctcagcagatcgaggtcgaggttaattatcggacgatttgcacttatcatatattatcacttactggcggctcatactgagctggttaatgctgtgcacacacaaacaagcaattccatttgtaatgtgcctccctggcagtttcatccggaactcggacgaaagtaaaaatgcatatgagttgcactaaaaaagcgactcacattgttccgttataatgcctgaagtagatcacagaatatatcttcagggatcgcatatctattaagttactcactcttttctatttatgacatgcgcgtgtttgtataaatgtaaatgtgagtccttgttccactctcgtgcagcatcgctggtcatacgcgaacacgtacaaacagcaatggtgaggcggcatcaagagcagggatccgtcatttatgcgagcattttaccccaaaaaccttttatttataagggtcattgcgaattatctgatgcaaagttatgttatgttaggcaaagtaatcttctattattaataagcacatcaaaacctttttgaatattaaataataattaattagcatcatcctcattcattaattccgcttaacaatagtttcacaccttgcccccattacgacacctcggaaatcatcacgctgttaaactctccgtaatgcggaaatatcatcatcgcgtttcattagtgaattcttaaatgaggcattttcacacaattatcttacagataaaaaaaccagacttacaattaagaatcagaacaattcactatataacattgcatgtaaagcatatacacctcattattttgtcattattaagttattaacagcacaatcgagccttcccctctggcaaaatcttattctgcagaccttcaaaacaccgtcctgggggagtacattgttctaagctgacttccacggcagggagtggcgataacagcaaaaaaggtcaagattcatgtcccccattgaaaaatccagcaaattagagaatgtctgttatgacatccgtggtccggtgctgaaagaagcaaaacgcctggaagaagaaggtaacaaggtactgaaactgaacatcggcaacccagccccgttcggttttgacgcgccagatgaaatcctcgttgacgtgatacgcaacctgcctaccgctcaagggtattgcgattccaaaggtctttactccgcgcgtaaagccatcatgcagcactaccaggctcgtggcatgcgtgatgttaccgtggaagatatttacatcggcaatggtgtatcggagcttatcgttcaggcaatgcaggcattgctgaacagcggggacgaaatgttggttcctgcaccagattacccactatggaccgcggcggtttcgctttccagcggtaaagcggtgcattatctttgcgatgaatcctctgactggttcccggacctcgatgatattcgcgctaaaattacgcctcgtacgcgtgggatcgttattatcaacccaaataacccaaccggcgcggtatattccaaagagcttttaatggagattgtggagattgcacgtcagcataatctcattatcttcgccgatgaaatttatgacaaaattctttacgacgacgctgagcatcactcaattgcgccgctggcacctgacctgctgaccattacctttaacggactgtcgaaaacgtaccgcgttgcaggcttccgtcaggggtggatggtgttgaacgggccgaaaaaacacgccaaaggctacatcgaaggtctggaaatgctggcttcaatgcgcctgtgtgctaacgttcctgcgcaacacgccattcagaccgcgctgggtggttatcagagcatcagtgaatttattacccctggcggtcgtctttatgagcagcgtaaccgcgcgtgggaactgatcaacgatattccgggcgtttcctgcgtgaaacctcgtggtgcgctgtatatgttcccgaaaatcgacgccaaacgctttaacattcacgacgatcagaaaatggtgctggatttcctgttgcaggaaaaagttctgttggtgcaagggacggcattcaactggccgtggccggatcacttccgcattgtcacgctaccgcgtgtcgatgatatcgagctgtctttgagcaagttcgcgcgtttcctttctggttatcatcagctgtaatcttaatttcactgccggagattgcatccggcagcgttatcccgccacaatgacctgatgatgtcatcatacgtaaggtcactatgaaacagagccatttttttgcccatctctcccgcctgaaactcattaaccgctggccgctaatgcgcaacgtgcggacggaaaatgtatccgaacacagtttgcaggtagcgatggtcgcccatgcgctggcagctatcaaaaatcgtaaatttggcggtaatgtcaacgccgaacgtatcgctttactggcgatgtaccacgatgcctcagaagtgctcaccggcgatctccctactccggtgaaatacttcaattcgcaaatcgctcaggaatacaaggctattgaaaaaatcgctcagcaaaaactggtcgatatggttccggaagagctgcgggatatctttgcgccgttaattgacgagcatgcatatagcgatgaagaaaaatcgctggtgaaacaggcagatgcactgtgtgcatatctgaaatgtctggaagaactcgcggccggaaataatgaattcttgctggcaaaaacgcgactggaagcgacgcttgaggcgcgtcgcagccaggagatggactacttcatggaagtatttgttcccagcttccatctttcgctcgatgagattagccaggattcaccgctgtaagcagccggagtctgcgtcgcatcaggcaataagcgccggatgcgacatcaggctcttgtcaaaacggaaacagcatcgggatcatcaccacacaaaccgccatcacgataatggtgaacggtacccccaacttcacaaagtcactgaagctgtaatttcccggacctaaaaccagtgtgttaacaggtgaagaaaccggtgtcataaaggcggcggatgctgccatcgccacgaccatcgcgaatggataaggcgacacccccatcgttttggcagcagccagcgcaatcggagccatcaacaccgccgtcgcggtattagagataaatagcccaataaccgccgacaagacaaacaaacaccccagcatcatatgtggcccgtaaccaccgccaatgtccatcagccctttcaccgccagcgcgacacctcccgttttctgtaatgccacagcaaacggcatcatcccaacgatcaaaataatgctcggccagtgaatggatttataggcgctttcagcatctatacagcggaatttccccatcagcaggcaggcgatgatagcggcaacaggattaggaatttcatctgtcagcattaacgccaccattagcaccagacagaaaatggcatggggtgcctggctgtgcgcgggcgatgcttcactcacctcttccggtaagttcagcgctacgaagtcgcggccctgtttggccagcataccgatcagtttccagttacccacaaccaggatgatatcgcccagcagcagaggctcatccgccagcgaaccttccagcgccacgccattgcgctttagccccaccacattcagtccgtagcgggtacgaaaaccaatttcgcgcaccgatttaccaatcagttctgactcaggaattaatgaaatctctgccatgcccacatcaagggcctggtcagaaaaatactcgccgcgcagtaccatcggctccagcaattgctcactacaaaattgccggagatcgacatcagccgcagacatatcaataagcaaaacgtcacgcgcgcgaaattcagaaaccccattaacgttcacgataacgcgacgaaaacgccgccagcgttcaacaccgatgacgttagcgccataacgctcacgtaatttgagatcatccagccgttgaccaatcattggcgatccggggcgaatagccagacgtcgcgcacgcccggtcagtcgatattcacggataagatcgcgaaaggttcgacgcgtccagccttcgcgctgcggggtctgggtatcccctttcagcatgaaacgcatcactaacatatacaaaatacccagcaccagcacgaccaggccaataggtgttacgctaaagaaactgaagccgtgatagccttcacgcagcaattcactgttgactaccaggttcggcggcgtcgccaccagcgtcatcatgccgctaatcagcccggcaaaactcaacggcatcatcaggcgcgacggcgaagtttgcatacgcatggcaacgcttaacaccacgggaataaagatagcgacaacgccggttgaactcataaacgcgccaagccccgcgacggtcagcatcaacaaaaccaacattttgatttcactgttgcccgcaactttgaccagccatgttcccattacggtggcaacaccggtacggaccaaaccatcgccaataataaacaaggcggcaatcaggacaacgttaggatcagaaaagccggaaaatacttcggggactgtcagcgttccgcttaaggcaaacgcgacaataacaaacaaagcgaccgcatccatacgcactctgcccgtcgcaaacaagacgatggcaacggccagtaatgaaagaacccaaatcaattcaccgttcacaacttatccttgttaattgagggggatgacttgattctgccataaaaaagccccgacgagacggggctaaatcatgatcaggtgtttcactgaataataacatcgccatttggctgtttggtcacagtaatttgctccagactgtggaggaccaaatcgacctcattcaggcgcggggtatctgccggagcgttaaccgcaatgacatggcaacccgccgccaggccagaaagcacgccagcgggagcatcttccaccaccacacactcctgcggcgcaagccccagcagctgcgcgcctaacagatacgcatcaggttctggttttccgcgcttcactcgctcagcggttacaaacacctctggtgcgggaagcccagctattttatggcgcgctcgcgctaccggcatggagccagaagtcacaatggcccacggaatacctgctttattcaaatgattgagtaaggcgattgcccccggaagcgcggtaataccttcggtttccgtggcctcgatttgctccagacgcgtaaactcggcggcaatatcagcctcggatttgcccgccataaaatggcgcagagaggtgatcgcctgtttaccgtgaatgaaagccagcacctcttccggcgctaacccatgacgtctggcccagttgctccacgcccgttctaccgcaggcagggaatccaccagcgttccatcaagatcaaacagaaaacctttgcaccgcacgcgggcctcctcaggcgttgataatttgattaatttcgttggcgctcaaatggtactgacgcgggcaggcatgccacacattaagcatgcgctgatatttttcccacattggcgtctgggcgttaaaaccgtgagttccggcgtcaaaatgggtatagcgcccttccacattaaccataaagcggacataaccgaggtaacgtgcttcagtggcggcgtcaaagccgaggaaggtgacacgacgttcatcgatggattgctggtcctgcaaattagaccaggaaacatgcaacgcatgatacatctccataatgtcgatgatagtgcggcaggtttcttctttcagctcgccaaactcgcgatccaattcacgcatctgtaatccgtaaccacgctcaataattgtttgcaggcgacggtaacgttcagcatttgccggatcgagcatagtcatcatcttgtactgattagacaaaataagacgttgcgcgttggtcatttccattgttgactcctgtatcactctactacggtgaaaaaaaagaaggctgagtatgccttcttttatatgcgtaatcaggggtcaattacaaatcatcaaggaaagttttatccagttgtttgaaggcgcgcttaagcgtgtcagctaatgcctggtaatcaggcttgccttcaacgggtgccaacacctgtccagactcctgcaatttaccgcgaacttcataaaaccagttgaggatagcagggggtaatggcgttacagaacgcttgcccagccaccataatccctgcatgggtaaacttaaggcgaacagcgcagtggcaactgccggcccaagctgaccgcccagggcaatctgccagcagagagtaaatacggcgatcggcggcataaaacggatcgcataacgcgtcatcttgataacgcgattttcgacaaagaccggggcaaggcgtttttccagcggccacgtctttgagtaatgctgtccccggcgaaacaagctaaaaaaattaacagaacgattatccggcgttgacatgcttcacctcaacttcacatataaagattcaaaaatttgtgcaaattcacaactcagcgggacaacgttcaaaacattttgtcttccatacccactatcaggtatcctttagcagcctgaaggcctaagtagtacatattcattgagtcgtcaaattcatatacattatgccattggctgaaaattacgcaaaatggcatagactcaagatatttcttccatcatgcaaaaaaaatttgcagtgcatgatgttaatcataaatgtcggtgtcatcatgcgctacgctctatggctccctgacgtttttttagccacgtatcaattataggtacttccatgtcgagtaagttagtactggttctgaactgcggtagttcttcactgaaatttgccatcatcgatgcagtaaatggtgaagagtacctttctggtttagccgaatgtttccacctgcccgaagcacgtatcaaatggaaaatggacggcaataaacaggaagcggctttaggtgcaggcgccgctcacagcgaagcgctcaactttatcgttaatactattctggcacaaaaaccagaactgtctgcgcagctgactgctatcggtcaccgtatcgtacacggcggcgaaaagtataccagctccgtagtgatcgatgagtctgttattcagggtatcaaagatgcagcttcttttgcaccgctgcacaacccggctcacctgatcggtatcgaagaagctctgaaatctttcccacagctgaaagacaaaaacgttgctgtatttgacaccgcgttccaccagactatgccggaagagtcttacctctacgccctgccgtacaacctgtacaaagagcacggcatccgtcgttacggcgcgcacggcaccagccacttctatgtaacccaggaagcggcaaaaatgctgaacaaaccggtagaagaactgaacatcatcacctgccacctgggcaacggtggttccgtttctgctatccgcaacggtaaatgcgttgacacctctatgggcctgaccccgctggaaggtctggtcatgggtacccgttctggtgatatcgatccggcgatcatcttccacctgcacgacaccctgggcatgagcgttgacgcaatcaacaaactgctgaccaaagagtctggcctgctgggtctgaccgaagtgaccagcgactgccgctatgttgaagacaactacgcgacgaaagaagacgcgaagcgcgcaatggacgtttactgccaccgcctggcgaaatacatcggtgcctacactgcgctgatggatggtcgtctggacgctgttgtattcactggtggtatcggtgaaaatgccgcgatggttcgtgaactgtctctgggcaaactgggcgtgctgggctttgaagttgatcatgaacgcaacctggctgcacgtttcggcaaatctggtttcatcaacaaagaaggtacccgtcctgcggtggttatcccaaccaacgaagaactggttatcgcgcaagacgcgagccgcctgactgcctgatttcacaccgccagctcagctggcggtgctgttttgtaacccgccaaatcggcggtaacgaaagaggataaaccgtgtcccgtattattatgctgatccctaccggaaccagcgtcggtctgaccagcgtcagccttggcgtgatccgtgcaatggaacgcaaaggcgttcgtctgagcgttttcaaacctatcgctcagccgcgtaccggtggcgatgcgcccgatcagactacgactatcgtgcgtgcgaactcttccaccacgacggccgctgaaccgctgaaaatgagctacgttgaaggtctgctttccagcaatcagaaagatgtgctgatggaagagatcgtcgcaaactaccacgctaacaccaaagacgctgaagtcgttctggttgaaggtctggtcccgacacgtaagcaccagtttgcccagtctctgaactacgaaatcgctaaaacgctgaatgcggaaatcgtcttcgttatgtctcagggcactgacaccccggaacagctgaaagagcgtatcgaactgacccgcaacagcttcggcggtgccaaaaacaccaacatcaccggcgttatcgttaacaaactgaacgcaccggttgatgaacagggtcgtactcgcccggatctgtccgagattttcgacgactcttccaaagctaaagtaaacaatgttgatccggcgaagctgcaagaatccagcccgctgccggttctcggcgctgtgccgtggagctttgacctgatcgcgactcgtgcgatcgatatggctcgccacctgaatgcgaccatcatcaacgaaggcgacatcaatactcgccgcgttaaatccgtcactttctgcgcacgcagcattccgcacatgctggagcacttccgtgccggttctctgctggtgacttccgcagaccgtcctgacgtgctggtggccgcttgcctggcagccatgaacggtgtagaaatcggtgccctgctgctgactggcggctacgaaatggacgcgcgcatttctaaactgtgcgaacgtgctttcgctaccggcctgccggtatttatggtgaacaccaacacctggcagacctctctgagcctgcagagcttcaacctggaagttccggttgacgatcacgaacgtatcgagaaagttcaggaatacgttgctaactacatcaacgctgactggatcgaatctctgactgccacttctgagcgcagccgtcgtctgtctccgcctgcgttccgttatcagctgactgaacttgcgcgcaaagcgggcaaacgtatcgtactgccggaaggtgacgaaccgcgtaccgttaaagcagccgctatctgtgctgaacgtggtatcgcaacttgcgtactgctgggtaatccggcagagatcaaccgtgttgcagcgtctcagggtgtagaactgggtgcagggattgaaatcgttgatccagaagtggttcgcgaaagctatgttggtcgtctggtcgaactgcgtaagaacaaaggcatgaccgaaaccgttgcccgcgaacagctggaagacaacgtggtgctcggtacgctgatgctggaacaggatgaagttgatggtctggtttccggtgctgttcacactaccgcaaacaccatccgtccgccgctgcagctgatcaaaactgcaccgggcagctccctggtatcttccgtgttcttcatgctgctgccggaacaggtttacgtttacggtgactgtgcgatcaacccggatccgaccgctgaacagctggcagaaatcgcgattcagtccgctgattccgctgcggccttcggtatcgaaccgcgcgttgctatgctctcctactccaccggtacttctggtgcaggtagcgacgtagaaaaagttcgcgaagcaactcgtctggcgcaggaaaaacgtcctgacctgatgatcgacggtccgctgcagtacgacgctgcggtaatggctgacgttgcgaaatccaaagcgccgaactctccggttgcaggtcgcgctaccgtgttcatcttcccggatctgaacaccggtaacaccacctacaaagcggtacagcgttctgccgacctgatctccatcgggccgatgctgcagggtatgcgcaagccggttaacgacctgtcccgtggcgcactggttgacgatatcgtctacaccatcgcgctgactgcgattcagtctgcacagcagcagtaatctcgtcatcatccgcagctttgcgctgcggatatctgaaccggaaataatcactatttccggttttttattctcttaatctgcattaatcctttctgattatcttgcttaactgcgctacatcaatgaattgcgccatttcactttgcatacttaccactttgttttgtgcaagggaatatttgcgctatgtccgcaatcactgaatccaaaccaacaagaagatgggcaatgcccgatacgttggtgattatcttttttgttgctattttaaccagccttgccacctgggtagttccggtggggatgtttgacagtcaggaagtgcagtatcaggttgatggtcaaacaaaaacacgcaaagtcgtagatccacactcatttcgcattctgactaacgaagcaggcgaacctgagtatcaccgcgtacagctgttcacgacgggcgatgaacgcccgggcctgatgaacttcccgtttgaaggattaacctcaggatcgaaatacgggacagctgttggcatcatcatgtttatgctggtgattggcggcgcgtttggcattgtgatgcgtacaggaaccattgataacggtatcctggcgcttattcgccatacccgcgggaatgaaattctctttattcctgcgctgtttattctgttttcacttggcggcgcggtatttggtatgggagaagaggccgtcgcctttgccattatcatcgcaccgctaatggtccggctgggctatgacagtattaccaccgtcctggtgacctatattgccacgcaaatcggttttgccagttcgtggatgaacccgttttgtgtggtcgttgctcaggggattgccggcgttccggtgctttctggctccgggttgcgcatcgtggtgtgggttatcaccactatgattggcctgatctttaccatggtgtacgcctcacgagtgaaaaagaatcctcttctgtcacgcgtgcatgagtccgaccgcttctttcgtgaaaagcaggcggatgttgaacaacgtccgtttacctttggtgactggctggtattgattgtcctgaccgccgtaatggtctgggtgatttggggcgtgatcgttaatgcctggtttattccagaaattgccagccagttcttcaccatgggtctggtgattggcatcatcggcgttgttttccgccttaacggcatgacggttaataccatggcttcatcctttaccgaaggggcgcgaatgatgatcgcccctgccctgctggtgggtttcgccaaagggattttgctgctggtcggtaatggtgaagcgggtgatgccagcgtgttaaataccatcctcaacagcattgccaatgccattagcggtctggacaacgcggtcgcggcctggtttatgttgctcttccaggcggtatttaatttcttcgtgacgtccggttctggtcaggcggcgttaaccatgccgttactggcaccgcttggcgatctggtcggtgttaaccgtcaggttaccgtgctggcattccagtttggtgatggcttcagtcacatcatttacccaacctcagcttcgttaatggcaactctcggtgtgtgcagggtggacttccgtaactggctgaaggtgggcgcgaccctacttggactgctgtttattatgtccagcgtcgtagtgatcggcgctcagttgatgggctaccactaaaaatgttaagagccgcaattgcggctcttttttcattctgccgtttcagtctctacggcttcatttttggcattgcgcttcatccacaacgccagcgctttcagcgagtctggagtgaactcatcgcagcgtgcggtgatttcttccggcgtcagccagcaaacttcactgacttcatcttcctgtagggcgaagggaccgtgagagacgcagctgaacaacgcgccccagacacggcaatttttatcttcgaaatagaactgcccgtgctcggcaaaggggacaccggcaatgcccaactcttcttccgcttcgcgacgcgcggattccagcagttgctcatcggcctgaaccacaccgcctgcggtcgcatctaacatgccgggtaaaaagtcttttgtctcggtacgacgctggaccagaattttgcccatgccatcatgcacgacgatgtaagttgcacgatgacgcagacactgtgcccgcatttgttcccggctggcttgtgcaatgacttcgttctcttcattgacaatatccacccattcagtacttgccaaacgacgctgttccattatcaggaaaccttctttttctggcgctcttacggcgcattttgagttgtgggtaaattacggattaatcgcgacctgcgcaatgatactttgatcattgagtgcgattacactaagtacgtcattatccagcatgccataactcgccggattaccgcctttcggaatactcaccgagccggggttgaaatggaaaatctccccccgctgttctgccactggcagatgggtatgaccgtacaccagcacatcgttctggtttaaagcaggtagattttccgggccaaaaagatgaccatgcgtcaaaaacagacgttgtttttccagtaatacctgttgccacggcgcggttatcgggaaatgcagcagcatttgatccacttcgctgtcgcagttgccgcgcacagcgataaccttatgtgccacttcattaagccgttcagcgactttggctggcgcgtaaccctccggtaaagcattacgcgggccgtgattcaacacgtcgccaaggatcaccagccactgggcaccgctttgggcaaacaactccagaacacgttccgtcgccggtaacgacccatgaatgtccgatgcaaacatcagtttcatcactcactcctcgtcgaaaaaacgtaagctatgatactggattctgtcgttgctatcagccagattgcttcgccgaaagtgcaataaaacgctggacagacgctcgctgccactggaatgtcgcataatccaccaggcgttctggcacctcatcgccatgtagtaccaggcggttaatcattagcgccagatcagtatcagcaatgcaccattcaccaaataaattcggctgacccagtactaacaaatgttctgccatcgcaaacagtttctctgcactggcttttccctcggccgttagtggcgcttttttcgcccccgcaaagacaacatccgtcggacgctcttcgcggatgggcatcagatcgctgcgcagccaggcctgaatctgtcgtgcacgcgcacgattttctaaatcaagcggataaatacgttcccaggtcggtggcgcaaatcgatcttccagatactccgcaatggcagaagattcactcaactcaaaatcatcgatttgtaataacggcacacggcgtgtctgaccgtaaccttgccacgtcggctgcaaatgttcaccgctgtcgaggtcgatggtcttgatatgaaacgacaggcctttttcctgcaacgccacccaggcggataacacataaggggagaaaaagtgggcatctgaccaaagcgtgatagcgggtttactcattatgtcctcggcaataaagggggctggctatcaaactatagagcctttttgtcactgtcacgtgacgaatactcacgtaagtcgccgcgctttctatacttgtggtgttcagatgattaaacaaccggagctgcaatgatcgatctctatttcgccccgacacccaatggtcacaaaattacgctgtttctcgaagaagcagagcttgattatcgcttgattaaggtagacctggggaaaggcggtcagtttcgtccggaatttttgcgcatttcgcccaacaacaaaattccggcaattgttgatcattctcctgccgatggcggcgaaccgttaagcctctttgagtctggtgccattttgttgtatctggctgagaaaacaggactctttttgagtcatgaaacgcgtgagcgcgccgccacattacagtggttattctggcaggtaggcggactggggccgatgcttgggcaaaatcatcattttaatcacgcagccccccaaaccattccttacgctattgaacgttatcaggttgaaactcagcgtctttaccatgtactgaacaagcggctggaaaactcgccctggctgggaggcgagaactacagcattgcggatattgcctgctggccgtgggttaatgcctggactcgccagcgaattgacctcgcaatgtatccggcagtcaagaactggcatgagcggatccgttcgcgccctgccaccgggcaggcactgctaaaagcacaactcggtgatgagcgttcggatagttaacagaaacaggttctcgtgtattatttcatcctaagtaaaacaacggagaacctgcaatggcacaacctgccgctattattcgtataaagaaccttcgtttgcgtacgtttatcggaattaaggaagaagaaattaacaaccgtcaggatattgttatcaatgtgacgatccactaccccgccgataaagcgcgcactagcgaagatatcaacgatgcgctgaattatcgcaccgtaacgaaaaacattattcagcatgtagagaataaccgtttctctttgctggaaaaattaactcaggatgtgctcgatatcgcacgtgaacatcactgggtgacgtatgctgaagtggagatcgataaactgcacgcgctgcgctacgccgattcggtatccatgaccttaagctggcagcgttaaccgccatatcgggaggctgcatgaacatagtgatcaccggagggacgggattaattggtcgccatttgattccgcgtttgctggagctgggccatcaaatcacggtagtgacgcgtaacccacagaaagccagttccgttctcggccctcgggtgacgctatggcaagggctagccgatcaaagcaacctcaacggcgttgatgcggtaatcaacctggccggagaaccgattgctgataaacgctggactcacgagcaaaaagagcgtctctgccaaagccgctggaatatcacgcaaaaactggtcgatttgattaatgccagcgacacgccgccgtcggtactcatttccggctcggcaacgggctattatggcgacttaggtgaagtggtggttaccgaagaggaaccgccgcataacgaatttactcataaactctgcgcccgctgggaagagattgcctgccgggcgcaaagtgacaaaacgcgagtgtgcctgctgcgaaccggcgtggtactggcaccggacggcggtattctcggtaaaatgctgccaccgtttcgtcttggcctgggcgggccgattggttccggtcggcagtatcttgcctggattcatatcgatgatatggtcaacggcattctctggctgctggataacgagctgcgcgggccatttaatatggtttcgccctacccgatacgcaatgaacaatttgcccatgcgctcggtcatgcgctgcatcgcccggctattttgcgcgtccccgcaaccgccattcggctgttaatgggcgaatcttcagtactggtattaggtggacaacgcgcgctgcctaaacggctggaagaagcgggttttgcgtttcgttggtacgatttagaagaggcgctggcggatgtcgttcgctgatgtggtttactgcaaacatccgccagttaactcccggtgttacagggttagtggctttgcgctataagatcgtctggcgatagtcgggtcaccatcataactaactctctgtctaaacctctatccagcatctcctgagcaatacgcagggcttcttcgcgtttgcccagaattaatccatcattccgcccttcttcacgtaatctgtcagcaatggtcatcagtttctccttttcttgtggtgcgcgttctgctatctcaccaataaatgcacggaaacgctgggcatctcccgtttgtaatacataattaaacagggcttttagctgtctgtcattagtgttccctgtaactagcagcgaaacaatttggtcgactaatcccaacagatcgcgctgacgaatatgtttctgaattaactccaacagcgccattttgcggtgttgcataatctcgtcatccggcaccacggtaatatccaccaacggaaaagccgatgaatatattttacgggcaatcgcaggctcagcaaattcatcaagccagcagagtgaataaggataaggacttctgcaaccatgataaaacagcatcgggatcaccaatggaagctctttatagcccgcatcaagatggttttgcattgccgcaatggaataacgcatcatgcgaaaagccattaattcttccggcttactttggtgctctatcactacataaatataacccactccctcctgcgttttcacagaccacaagaggtcggaataatattgccgcaggtcgtcatcaataaaactgtttggttccagtttaagcgtcgttaaatcacacagtttgcgcagcggcgcgggaagatgaatatcaataaaatcccgcgcggtgtctggatggcgtaaaaaagatttaaataccgcatcatgcggcgtggaagttgtcgatattgtcatggcgttccgtcacccctcaaatttaagatgacgcgacaataaccacgattaacacccaatgcagcaggcagtttttatctttggacagcgaattcagaagtatttttagcggactgcaacttttacatttcagcggaagctgactcgcaaattccccatgaaaatactccggcagcgttagccaccggagaggaaattatttcagcgatcccttaaggaactgttgcagacgagggctttgcgggttgccaaataactgctccggcgcgccctcttcttctattttcccctgatggaggaaaatgacgtgagtagaaacatggcgagcaaagcccatttcgtgagtcactaccaccatggttttcccctcttctgccagttgctgcataatacgtaacacttcgcctaccagttcaggatcgagcgccgaggtaggttcatcaaacagtaaaacttccggttccatcgccagcgcccgcgcgatagaaacacgctgttgctgaccgccggaaagatgcaccggatatttcccctgcgcacgttcgtctatcccgacttttgccagatacttcaccgcccgctcgcgcgcttcctgcttgctcaggcccaacacctgaatcggcgcttccatgacgttttccagcaccgtcatatggctccagagattgaagtgctggaataccatcgtcaggcgtgtgcgcagtaagcgcagttgatttttatcggcgactttgagttgaccgtctttgtcgcgcaccagattgatcgtctggccattgaccacgatcgacccttcactcggtttttcgaggaagttaatgcagcgcagaaaggtacttttccccgatcccgacgatccgatgatgcttattacatctccggcattcgcttgcagtgagacccctttcagcacttcatgttcgccgtagcgtttgtgcaaatcgataacgtttaatttattctcggacatcgtattctcagtgcgttgaagaaggtttcacatgctgcaaccagcgtttttccgctctgcgaaagaggctgatcaggacataagagatgattaaatagagcaccgcggcaatgccgaaggcggtaaaaggttgatacgtggcggcgttaatatcgcgggctattttcagcagatccggcacagtggccgtaaacgccagcgcagtagagtgcagcatcaggatcacttcgttgctgtatgccggtaacgcaatacgcagcgcagaaggcaaaataatgcaacgatacattttaaaagtcgagaagccataggctctggcggcttcaatttccccatgcggaaccgaacggattgccccagcaaaaatctcggtagtgtaagcgcaggtgttaagcgtcagcgccagcacggtacagttcaggccactgcggaagaaagcgttaaggaattcggttcccttaacaatctcaagcgtgtacatgccggaatagaacaccagcaactgaacatacagcggcgtaccgcgaaaaatataggtaaataaccagattggaaactggatgtatttattactggagacacgaccaatcgccagaaacagcgccaggactccgcctatcactaccgacaaaataagcagccacagagtgatcgccacaccagtaaagcgataaccgtcggtccacagcagcggtttccagtattcatgtaagatttcgatcacaggtcagccctcttcacacccacggagtagcggcgctcaaggaacagcagcacaccattggaaacagtggtgaaaaccaggtaaatcacgccacagacgatggcgaaatagaacggttcccaggtacttttgcctgccagttgggtggctttgaccacatcttccaggccgagtaacgaaaccagtgcggtagatttgaggatcacctgccagttgttgccaatgcctggcagggcgtaacgcatcatcgccggaaacatgatccgccgaaacacttgcccacgagtaaaaccgaacgccgtcgccgcctctatatgccctttcggcactgccataaacgcgccacggaacgtttcggtaaaataagcaccgtagataaaaccgagagtaataataccagcgaccatcggatcgatatcaatctgcccgacgcccatcgcctccgtcaccgtgtttagtgcaatctgcaaaccgtagaaaatcagcagcatcaacaccaagtccggcacgcctcgaatcagcgtggtgtacccttcgaaaatcagccccgaaagccgattttgcgagagcttaccgccagcgccaattaaaccgatgattacagcgagcactacagagctgatagccagctccagcgtgacgagcgcaccctgtaaaataacacctgaaaacccatacaacatgctgcctgtcctgtcgtgtgtggtgaattaccgcctcttgtctccctccggttacccgaagggagcgggctttctttcaccgatggcgattagccaccataaacatcaaaatcgaagtactttttcgctaatttctcgtaagtaccgtcagcgcgcatttcggcaaaggctttgttcagtgcttcgcgcagttcgttatcttctttacgcaggcccatgccggtccctacgccaaacagtttttcatctttaacagacgggccaccgaatttgtaatctttaccgacaggttgtttgaggaaaccttcgctggcagcgacctcatcctggaacgcggcatcaatacgtccggcagtcaggtcagaataaatgttgtcctgcccctgatacgagacgatttcaatgccttttggtgcccaatgttcgttaccgaacgtctcctgggtggtgccctgcaatacgcctacccgcttgcctttcagcgactcgactgtcggctgaatgtcggaatttttcgccaccaccagacgagaatcggcagcgtacagtttgtcggtgaaggcaatttcttgctgacgtttttccgtaatggaaagcgatgacatgatggcgtcaatcttcttcgcttttaaggacgggattaacgcatccagcggattttcgacaaacgtacattgcgtattgatgcgtttgcataattcctttgccagatcgatatcgaagccaaccagttcgccttgtgaattttttgattcaaatggcgcataggtcgggtcggtaccgatgcggatgttttgcggaatcgcagcaaacgccgcagttgcgctggagaaggccagaaccagagagagcgatagcaccagttttttcataatgtcctcaactgacagtctttttatagggaatatttacaggtttgttacacttatcgtgccataaaattgaccatcaaggcaaaatatcccgccccgttagacgtattatttttcattaaaaatgcttaagtatgcatttcaatgcaccacgatagtgcaacaaacctggcgtgcaccatgatgatcattccatcaggtacagcttcccagcgacgtatcagtcaccgtagacattaaagtcgaaatactttttcgccatcttgtcgtaggtgccgtcctgacgcagctcgccaagcgccttattgaaggcagccgtcagttcagcatcatctttacgtagccctacaccggtgccatcaccgaagtattttttgtcttttactgatgagccagcaaaggcgaaatctttaccagcaggttgcttgaggaatccttcgctggcagcaacttcatcttgtaacgcagcatccagacgtcctgcagccagatcggaatagaccaaatcctggttggcataggccaccacatccacgcctttgctacgccaggtctcgttagcgtaagcttcctgggttgatccctgcagcacaccaacatgtttacctttcagtgaatccagcgttggctgaatcggtgaacctttggcagcaatcaaacgagaatctgcggcgtacagcttgtcggagaaggcaatctcctgctgacgtttatcggtaatggaaagcgacgaaataatggcgtcgatttttttcgctttcagtgaggggatcagcgcgtcaaagtcactagcaacccaggtacatttcacctgcatccgtttgcacatctcgttaccgagatcgatatcaaagccaacaaaatcacctttagcatctttcgacgagaacggcgcataggtggtatcggttccgatacgtaccgtctccggtagcgccgcatagctggaagccgctgcggagagaccgactaacaaagacagagcgagaatcgacttcttcatacataaccctcaagtgaaaatggcttttctatgttgtgtattgtgttgtgtgtttgcaggctctttcatgcaggtcttatgccatcttgacgacaacagtaacattcaacgttaaatatgttaataagacgttgcattattgtcctgaagttgaagatagcaggtatagcggttgaatcgcagcgtttcgattgaatggcagaaacaaaatgtcgaggatttgatcgcggttgcaaaattgccctgaaacagggcaacagcggagttatgcgccctgccagcgggcaaagagatcttcaggaagggttatcgcaaactggtcaagaacacgattaaccgtctgatttatcacatcatcaagggactgtgggcgatgataaaacgccggaacgggaggcataatcaccgcaccgatttctgctgcctgagtcattaaacgcagatggcctaagtgcaatggtgtttcacgcacgcagagcaccaacgggcgacgctctttcagcaccacatctgccgcacgggtcagtaaaccatcggtgtagctatggacaatgccggaaagggttttgattgaacagggtaaaataaccatccccagcgtctggaaagaaccggaagagatgctggcggcaatatcgcgcgcatcgtgcgtgacatcggctaatgcctgcacttcgcgcagagaaaaatccgtttcgagggataaggtctggcgcgctgcctggctcatcaccagatgcgtttcgatatctgtgacatcgcgcagaacctgtaataagcgcacgccataaatcgcgccgctggcaccgctgatgcctacaatgagtcgtttcataaatagttgccctgtcagacttgcaggcagactttgcaggatttcggcgggagttgcaagtcagggtgccagaccggcaccctcagcgaaggcatcatccttcgttatgcatttcgagattttccacttcgttctgacgttgcactgctttggcgtcatcattacgtaacgtatcgaggaaatcgaggtagccctgatcaacatctttggtgacgtagacgccgttgaacaccgagcattcaaactgctggatatccggattttcagcgcgaacggcgtcgatcagatctttcagatcctggaaaatcaacccgtcagcaccgatgatctggcgaatttcatcaacttcgcgaccgtgagcgataagctccgtggcgctcggcatatcaataccataaacgttcgggaagcgaatttccggtgccgcagaagcgaggtacactttcttcgctccggcttcgcgtgccatctcgataatctgctcagaagtggtgccacggacgatggagtcgtcgaccagcaggacgtttttatcgcggaactcggcgcggttggcattcagtttacggcgcacggacttacgacgcagctgctggcccggcatgataaaggtgcggccaacatagcggtttttaacgaagccctggcggtacggtttgcccagaatacgagcaatttccagcgcgatatcacacgaggtttctgggatcgggatcaccacgtcgatatccagatcttcccattcgcgggcaattttctcgcccagtttcgtgcccatattcacacgcgcgctgtaaacggaaattttgtcgatgaacgagtccgggcgagcaaagtatacatactcaaacaggcacggattgctgaccggattgtcagcacattgacgggtaaacaactgcccttcttcagtgatgtaaatcgcttcgcccggcgcgacgtcacgcaggaaatcaaagcccagcgtatcgagcgctacgctttcggaagcgaccatatattctgtacggttctcgtcaatatcacgttttcccagtaccagcggacgaatcccgtttggatcgcggaaagcaaccataccgtggccgataatcatcgccacacaggcatacgcgccgcggattaagcggtttgtggcagcaatggcagcgaaaatattgtcggcttccagcgggtagtggcggaaattgtccagctcgctggcgaagatattaagcagaatttccgagtcggaagtggtgttgatgtggcggcgtttttcttcaaacagttttttacgcaactcgtgagcgttggtcagattgccgttgtgggcaagcgtaatgccatacggggagttaacgtaaaacggctgcgcttcagaggcgctggagctgccagccgtagggtaacgcacatgaccaatgcccatattgccctgcaaacgctgcatatggcgagcttcaaatacatcgctcaccagcccgttcgctttacgcaaacggaagcagttattggcatctatggtgatgatgccggcggcatcctgaccgcgatgctgaagcaccgttaaggcatcataaatcgactggttaaccggcataacaccggcgataccgacaataccgcacatacgtctttttcctcgttaagccacatctcagagcacttacgctctgggcaagaaacttgacgagctttgcagataatcaaaaaaccatctgatgataaaactgaattgcgggatcagctgtgatttgctccagtcttcgcttttcgacaccccggtaaaggagtcgagaaagaagagaatggcggcaacaatcaacacaccgcgcaacgcaccgaaacagacgcccagcacccgatcggtgcctgacaaccccgttttctccaccaactggcctatcacgaagttcacgatagcaccaacgatcagggtagcgataaacagtaccgcgatggcaatcccatttcgaaccagttcgtcttcaaagcccgtaaaccagactgacaggtaagtgtagtaatgactggcaacaaagaaagcacaaccccatgtcaccagcgataacgcttcacgaacaaagccgcggatcaggctaaccagagaggaaaaagcaatcaccgcgattatggcgtaatcaatccagaccatatgtgtcccacgattttacgccctgtcatcctgttcggggcgcattctaacagaaaaagaaaacgtttgcgtagggatttccttcccacgcatcaataaaaatggcgctgaaaaaatattcaacgccatcgactttttatgcctttgcggcatcgtgcaatgcgtgtcggatgcggcgtaaacgccttatccgacctacggttctaacactgcccaggcctgataagacgcgccagcgtcgcatcaggcaagactgtattaattcggcgtatagcccattaccacgccacttaagccagaaagttgcttcaactcacccagcgaacctttcagcttatctttcgaggcatccggcccaaccagaatacgggtaattttaccctgcactggcgtggatggcgacgtataaacccgataaccggcaccgcgcagcttaccgacaatctcattcactttatcggcatttttcagcgcacccagttgcacaacataggctttacccgtcggtgcagctttttcttccacgaccggcttcggttctggcttcggcgcaggtggtgcttcaaccttcggtttaggcggctccaccggtttcggcttcggtggggcgaccggtgcaggttccggttcaaactcggtgttattggctgcaatagtggtcggatcgagcgacggtgctgcggcatcacctgcccgcacctcttccgctgcgccttccggcggctgcgtcggcaacgcctgggtggcggctggcatcatatcaggctcatcgcgatcgcccgctttcggcaccagcgggatagccgcgaactcatcctgataatgttttttctgcccgtccagcagccctggaagtacaatcacccccagcgccaccagcacgatcgtgcccactaaccgattctgaaacttacttgccaccgcttctcctcgcgtcaatcacttccatgacatgtgcgaccgtgtggaaagaaccacacaccagcacggtgtcttccgctttagcgtccgccattgcggcatcccatgcctgcgcaacgctatcaaatgatttgccgttacccaaatgctcaagcagttgttctgccgtggcaccgcgcggcccttccagtggcgcacaataccagtcatcaaccacgcttttcaaccaggccagagttccggcaatatctttatcatgtagcataccgataaccgccagcacgtgcccgtttttcggtaaggctttcatacgcccggtgagatattccgccgcatgtggattatgcgcgacatcaaaaataacgcgtggcgactcgctcacaatctggaaacgtcccggcaaaattgcgctggcaatcccgtcgcgaatggcattttcactgacctccagcccgctggcacgcagtgccgccagcgccgttgcggcattcggttgcgggacaagcggcaacggcaaattttccagcgtgccgtgagcatcgctaaacgtccagtcatgatcggtgacggaatagttccactcaacgccccgacgttgtaacagtgcacctttttcctgcgccacatcagcaatggtagaaggcatttccggctcaccgacaattgccggtttttcgctgcgaaagatgcctgctttctcgcgaccaatactttcgcgatctggccccagccagtcggtatgatccagcgcaatgctggttactaccgcgacatcggcgtcgacaatattggttgcgtccagacgaccgcccagccctacttccagaatcaccacgtcaagttgtgcctgcttgaacagccacaacgccgacagcgtaccgtactcgaaataggtcagggaaatatcaccgcgtgccgattcaatctccgcaaaagaggcggtgtgggccgattccggcaattcctggccctgcacacgtacgcgctcggtataacgcaccagatgcggtgaactgtagacgcccactttgtaccctgccgccatcagaatcgactccagcgtacggcaggtggtgcctttgccattcgtacccgcaacggtaaacacaaatggcgctggtttcagaacgccaagacgcgccgcgacctggctcacgcgctcaaggccgagatcgatagttttactgtgcaggttttccagataagaaagccacgaagccagaggcgacgcggcttgaggagtgcgtttgataatcatggtatccgctgattcgttacggtgagaatagcaaaagggcagagccagtggccctgcccttatcagttatcaggcctcaggttcctgatccggtaccgggggtaccactacgccttcacgcggcgcttcaggattcggcgctggcagattcatcaacttcgccagaatgctcgccagtttcaggcgcatttccggacgacggacgatcatgtcgatcgcgcctttctcgatcaggaattcactgcgctggaatcctggcggcagtttttcgcgaacggtctgttcgataacacgcggaccggcaaagccgattaacgctttcggttcagcgatgttgagatcgcccagcatggcgaaacttgcagaaacaccgcccatcgtcgggtcggtcagcacggagatgtacggcaagccgcgctcctgcatttttgccagtgccgcagaggttttcgccatctgcatcagcgacatcagtgcttcctgcatacgtgcgccaccagaggcggagaagcagatcagcgggcagttatcttccagcgcctgctcaacggcacgcacgaaacgtgcacccacaacagaccccattgaaccgcccataaaggcgaactcgaatgccgcagcgacaaccggcattccatacagagtgcctttcatcaccaccagcgcatctttttcgccagtttctttctgcgcagatgccagacggtctttatacttcttggagtcacgaaacttcagcacatctttcggctcaagctcgctacccagctccacaaggcttccttcatctaacaggctatgcaggcgattacgcgctgtcatacgcatgtgatggtcacacttcggacagacctcaagattacgttccagctcagcgcggtataaaacctgaccgcagctatcacacttagtccacaccccttcaggaatgctcgccttgcgggtgggagtaatgttgcttttaattcgttcaatccagctcattagggacctttctgtctgaacctggttcgatgccagttttatctttggggacgcataatgccatttttgcccccaacagaccatgaatgttgcacattaaaacataacagcccgaaactttggataaaaaagtggtcgaaccgcggagttactttttattttgcggcgcgtgccgcagcgcgtttgtgacgaataaattcgaaaaccccaggcaatattgaaacaaaaataatgccaacaatcatcagcttaaggttgctctgaatgaaggggagcgtgccgaagaaataacccgcgtaggtaaaaatcagtacccacaacagtgcgccgatcacgttataagcggcgaaatgacggtacgacatgtggcccattcccgcaacaaacggcgcgaacgttctgacgatcggtacaaaacgggcgagaataatcgttttgccgccatgtctctcgtaaaactgatgagtcttatcaagataactgcgacgaaagattttcgaatccgggttactgaacagtttgtcaccaaataaccgtccaatggtatagttcactgcatcaccgacaatagcggcaatcaacataagcaccaccatcatatggacattgagatcgttagtttccagcgacgccaatgcaccagcaacaaacagcagcgaatcaccaggcaggaatggcgttaccaccagccccgtttcgcagaacagaatcaaaaacagaatggcataaacccagacgccgtactccgcgaccagctctgccagatgcacgtcaatgtgcaggataaaatcgatgaggaaataaatcaggtccatatttgcctatgccttgtactcgtcatctttcaggctgtaactacgttggctacagcctgaaatgttccgagcattattctcgttagtccgccagaaatagcgggcccattggcggttttggaagatcataccggtcagggtaatccaccgcgaccagatacagcccttccgcttttgccgttgctgccgccagcgttctgtcctttgccgccagcaactctgctatccagctctccggctggttgtgggcaccgacttccatcaggctgccgacaatattcctgaccatatgatgtacaaaggcattcgctttgatatctaccaccacataaggaccgtgacgcgtgacattaatatgcataacgttacgccacggggttcgggactggcactgcaccgcacggaacgaggtgaaatcattctcgcccagcaagcattgcgcagcccgatgcatccgttcagcgtccagcggttcgtaaaaatgggttacccctttactcagtaccgccgggcgcagccgatgattgtagatgatgtagcgataacggcgagccgtggcgctaaatcgggcatgaaaatcatcaggtacagctttaacccaacgcacggcgatgtcaccaggtaaattcgcatttacgcccaaggtccacgccgcgtctttgcgctgcgcggtcgtttcgaaatgcactacctgcccggtaccgtgtacaccagcgtcagtacgcccggcgcagaagacggtaatgggttcgttcgccacctgggagagcgccttttccagcttctcctgcacactgcggacttcattctgccgttgccagccgtaatacttactgccgtcgtactcaatgcccagcgcaattttataaactggcggttgttgctggtccgacattagtacagatactcctgcaccagtttctcggcgatttttactgccatcagcgcgccgccaaagcgaacgttatcggccaccgaccagaactggacttgctccggcataccgtagtcattacgcacgcagccaacagaaagatgcggcgtacccgaagcatcccctacctgagtcgggaattcgttctcttcagagagcacaatatcttcgccctgagcaaacgcatcacacgcttcttctgccgccagcggacgcagtgcttcaaagttgaccatctgggcatgaccgtagaataccggtgcctggacgacgcttgccgaaatcatcagcccttcgtcctgcaggattttgcgtacttcgtcaacgatacgacgttcttcacgcacgctaccttcgctatccggcaacaacggcagcatattgaacgccagttgacgaccgaagaaatcttcttcgtcaatcggaatgccgttgagcaatttcgcactctgccccgctaacgcatcgaccgcttttttgccctgggcggaggctgaaatcaggctggtaacactgatacgcgacaaaccgccctgatcgattaacggtttcagtgccgccagcagctggctggtcagactgtctggtacggcgatgacattccggttgcggtaatcggtcagtacaaacgggtttacttccggcaccaccagcggtacgtcgggttcgagagcaaacagtccgctgctgtcgatcaccaggcaacctgagttggtcgcttcttcaacccaggcagcggtagcttctttgcctgcgacaaaaaatgccagctgcgcctgcgtccagtcgaattcagcggcatcctgcacggtgattgtcttaccaccaaagcgcagttgttcgcctgcgctttcgttacgtgccagtgcataaatttccccaaccgggaactgacgttcagccagcgtttcaagcagggcttcgcccacagcgccagttgcgcccaggacggcaatgttccagccttcagacatggtggtttactccagaaatagcaaagctccctgccaatgttacagcagagagcatgaagaagagattaacgtgccggatgatgaacggcgttaaaacccagtttacacagcaatgatgccgcactggcgtcatcacaaattacatacagagatgaccattcacggcgctcaagatagtttttgcgcagtttatcgaactcacccggtatcccggcgactttacgcagcggtgcgtcatcgcggcgcacatcatacaccaaatgcaccagccttttcagcgtcggttgatcgagcgggccatgcagcgtaatgcgaccaaactctggcgcgggcagtaatgtatccagcgcaacgtgctgttcatgcccaataaacttgctataggcttcaaacacttgcgtagtaccgcgtgctttaccttccagggtatagcctgcgatatgcggcgtgccgatatccacttttgtcagcaattccacgttaagttccggttcgccttcccagacatccagcactacgcttaacttctggccttcattcaggcaggtcagcaacgcagtattatcgacgactgcgccacggcaggcgttaatcagaatcgctcccggcttcaggctacggatcagtttttcatccgccagatgcagcgttttgtacggcccgtctttgaagagtggcgtatggaaagtcagaatatccgcatgctgaactaattcatccagcgagcggaaatcaccctcatccccacggtcaacgcgaggcggatcgcaaagcaatgttttaatccctaacgcttccagtcgcgcctgcaatcgacgtccaacgttaccaacgcccacgatccccaccgtacggtcgtgcagtgaaaatccatcgcgttcggcaagcatcagtagtgaggagaaaacatattccaccaccgcaatcgcattacagccaggtgccgcggaaaaaccaattcccgcctgctttaaccatgcttcatcgacatggtcggtccccgctgtggcagtaccaacaaatttaatgggttttcctgccagcaaagattcattcactttcgtgaccgaacgcaccatcagcgcatccgcgtctgccagttgagcgacggggattggacgcccgggaaccgcggtcacctcacccaaacggctaaataagtcgcgggcataaggcatattttcatcaacaaggattttcacgtttgtgttacctgtatgagacgagagttaaccggacaagtgtgccataatctcgcggccaggcatacttgcgaagatttcaggtataaggatacgtaatgatacaacctatttccggccctcctcctgggcaaccaccaggtcagggagataacctgccgtctggcgcgggcaatcagcctttatccagtcagcaacgtacttcgctggaaagcttaatgacgaaagtgacctcactgacgcaacagcaaagagcagaactgtgggcgggtatcaggcacgatattggtctgtcgggagattcaccgctgctttcgcgtcacttccctgccgctgagcataacctggcgcaacgtctgctggccgcgcaaaaaagccattctgcccgccagcttttagcgcaattaggggagtatttacgtctggggaataatcgtcaggcggtcacggattatatccgtcataactttggtcagacgccgctgaatcagctctcaccggagcaattaaaaaccattctcaccctgttgcaggaagggaagatggttattccgcaaccacagcagcgcgaggcgaccgaccgtcctttattaccggcggagcacaatgcgctaaaacagctggtgaccaaacttgcggcggcaacgggggaacccagcaaacagatctggcaatcgatgctggaactttccggggtgaaagatggcgagttaattccagcgaaactgtttaaccatctggtgacctggctacaggcgcgtcagacgctaagccagcaaaatacgccgacgctggaatcactacagatgacgctaaaacaacctttagatgccagtgaactggcggcgttatcggcatatatccagcaaaaatatggtctttctgcgcaatcatcgctttcttctgcccaggccgaggatattcttaatcagctttatcaacggcgggttaaagggattgatccgcgtgttatgcaaccgctgcttaatccttttccaccgatgatggacacgttgcaaaatatggcaacgcgtcccgcgctgtggatactgttagtcgcgattatcctgatgctggtctggctggttcgttaaccccgacgaaatgacagtatcgtgacaataatacccagcaccgcagagatcgccccggcaagaaataccgaagagtaaccaaacgtggtcgccagcattcccgccagcggcccggagacgccgagggcgatatcctgaaacgcggcgtaaccgcccagtgcggtgccgcgaacttgtgaggggacgcgtttaaccacctccacgcccagcgcaggaaagataagcgaacatccggctccggttaacgccgcgcccgctaatgcgacccatgcacctggggcttgccagagcagcaacaagcccaccgtttctacaagcagagagacaatcgccactttcacgccgccaaaacggtccggcatccagccaaacatgacgcgcatcacgacaaatgcgccgccaaacgcggtaagagtaaagcccgccatcgcccatcctttgctggcaaagtagagcgaaacgaaagtcccgataacagcaaaaccaacgccttgtagtgccagacctaaccctggtttccagataagcccgacaacgctccacagcgatggacgttctcccgccagggccggtactttgcgcactgtgccgttacaggcccacgccagtacgggtaataccattgtggtgatcgccagtgcggcaaaaccgtaatggctatgaatcaacaggccaagcggagcaccaacagcgagggcaccgtaaatcgccattccgttccatgacatcactttgccagagtgttttggccctacgatgcctagtccccaggtcagagcgcctgtcagtaactggctttcaccaaagccaagaatcaaacgcccgacgaccaacagagcaaatttgaacggtgcggagacaggcaaaatcgccgccagcagcaacgcgccgccagccagaccacaagctaacattccctgaagcgccgaacgttttgcaccatattgatcggccagtcgcccggcgtaaccacgcgtcagcaccgtagccagaaactgaatcccgacggcaatgccgaccatggtattgccatagcccagttcatgatgaacaaacagcgggataaccggcaacggcaaccctacggtcatgtaggtgagaaaaaccgcaaaagcgatgcggaagagcgaaaaattggcagaagatcgtgtttcggtttggcttacagcagtcatgcattactccagaatgcagcgcaaggcgaggagtatccccgtctcatctctctggtttcagggttacagtgcgttggcaggatttaacgcgtacgtcttttcagaaggaaatcgacaaagcgggaagtttgcctggaacaggcggcgattgtcaatgatgtgaaaaagggaaccatcaggttcccttttgcgttagtgccggaggccgcattagcgcgtaacgtcggatgcgacgctggcgcgtcttatccgacctactccgacctactccgactactccggcctactgcgaattaatctttcagcttgcgcattaccagcgtggcgttggtgccgccgaagccgaagctgttagacataacggtggtcagttcgcgatcggtcgtttcggtcacgatgttcagacctgcagcctgctcgtccagctcttcaatgttgatgctcggggcgataaagccgtgttccagcatcagcagagagtagatagcttcctgtacgccagcagcgcccagagagtgaccggtcatggctttggttgcagaaatcgccgggctcttatcgccgaacacttcacggatagctgccagttctttcacgtcgccaaccggagtcgaagtaccatgagagttcaggtaatcgattggggtatcaacgccgtgcatcgccatcttcatgcagcgtactgcgccttcgccagacggagcaaccatgtctgcaccatcagaggttgcgccgtagccaacgatttcagcatagatgtgagcaccacgcgccagcgcgtgttccagctcttcaaccactaccataccgccgccgccagcgataacgaaaccgtcacggtgagcgtcgtaagtacgggaggctttttccggggtgtcgttgtatttagtagacagcgcacccatcgcgtcgaattcgcaggccatttcccagcacagctcttcgccgccgccagcaaacacgatgtcctgtttgcccagttggatctgctctactgcgttaccgatacagtgtgcggaagtcgcacacgcggagctgatggagtagttaacgccatgaattttaaacggcgtggcgaggcaggcagaaacgccggatgccatcgctttggtgaccacatacgggccaaccgctttcaggccgcgcgggccgcgcattgcgtcagcgccgaacacctggaaacgcggggaaccgccgccagaacctgcaatcaggccaacgcgcgggttattctggtaagcttccggagaaaggcccgcatctgcgattgcctgctccatagaaaggaatgcataaatggatgcgtcgctcataaagcgcacaactttgcggtcaatgaggccagtggtatccagttttacgttgccccagacgtggctacgcatgccggaatccttcagctcctgagagaaagtgatccctgaacgtccttcacgcagagatgccaggacttcctgctggttattaccgatgctggaaacaatgcccaggccagtaatcactgcacgtttcattcaatacctctgtaagtcgcacatagagtaagtttcgaatgcacaatagcgtacacttgtacgccgaacaagtccgatcagccatttaatagagaaatttgcgcagccttacacacatcgctaagatcgagccaccgcctgtaagacgagtaacttacgtgaaacactactccatacaacctgccaacctcgaatttaatgctgagggtacacctgtttcccgagattttgacgatgtctatttttccaacgataacgggctggaagagacgcgttatgtttttctgggaggcaaccaattagaggtacgctttcctgagcatccacatcctctgtttgtggtagcagagagcggcttcggcaccggattaaacttcctgacgctatggcaggcatttgatcagtttcgcgaagcgcatccgcaagcgcaattacaacgcttacatttcattagttttgagaaatttcccctcacccgtgcggatttagccttagcgcatcaacactggccggaactggctccgtgggcagaacaacttcaggcgcagtggccaatgcccttgcccggttgccatcgtttattgctcgatgaaggccgcgtgacgctggatttatggtttggcgatattaacgaactgaccagccaactggacgattcgctaaatcaaaaagtagatgcctggtttctggacggctttgcgccagcgaaaaacccggatatgtggacgcaaaatctgtttaacgccatggcaaagttggcgcgtccgggcggcacgctggcgacatttacgtctgccggttttgtccgccgcggtttgcaggacgccggattcacgatgcaaaaacgtaagggctttgggcgcaaacgggaaatgctttgcggggtgatggaacagacattaccgctcccctgctccgcgccgtggtttaaccgcacgggcagcagcaaacgggaagcggcgattatcggcggtggtattgccagcgcgttgttgtcgctggcgctattacggcgcggctggcaggtaacgctttattgcgcggatgaggcccccgcactgggtgcttccggcaatcgccagggggcgctgtatccgttattaagcaaacacgatgaggcgctaaaccgctttttctctaatgcgtttacttttgctcgtcggttttacgaccaattacccgttaaatttgatcatgactggtgcggcgtcacgcagttaggctggaatgagaaaagccagcataaaatcgcacagatgttgtcaatggatttacccgcagaactggctgtagccgttgaggcaaatgcggttgaacaaattacgggcgttgcgacaaattgcagcggcattacttatccgcaaggtggttggctgtgcccagcagaactgacccgtaatgtgctggaactggcgcaacagcagggtttgcagatttattatcaatatcagttacagaatttatcccgtaaggatgactgttggttgttgaattttgcaggagatcagcaagcaacacacagcgtagtggtactggcgaacgggcatcaaatcagccgattcagccatacgtcgactctcccggtgtattcggttgccgggcaggtcagccatattccgacaacgccggaattggcagagctgaagcaggtgctgtgctatgacggttatctcacgccacaaaatccggcgaatcaacatcattgtattggtgccagttatcatcgcggcagcgaagatacggcgtacagtgaggacgatcagcagcagaatcgccagcggttgattgattgtttcccgcaggcacagtgggcaaaagaggttgatgtcagtgataaagaggcgcgctgcggtgtgcgttgtgccacccgcgatcatctgccaatggtaggcaatgttcccgattatgaggcaacactcgtggaatatgcgtcgttggcggagcagaaagatgaggcggtaagcgcgccggtttttgacgatatctttatgtttgcggctttaggttctcgcggtttgtgttctgccccgctgtgtgccgagattctggcggcgcagatgagcgacgaaccgattccgatggatgccagtacgctggcggcgttaaacccgaatcggttatgggtgcggaaattgttgaagggtaaagcggttaaggcggggtaatctgctctcgcagtgtttgccggatgcggcgtgaacgccttatccgacctacgtgtgacgtgtaggcctgataagacgcgataagcgtcgcatcaggcatggtgctccagacgccgcaacttactgctgtgacgcctgctgaaacaggttttcccacatatcggtcaccagcgcctggtcacgcggcgacaattcaccggcaccaatggctttttccagactctggctaacggtcgtatgcaccgcctgagcggagtggtcatcaccactttccagttctgcgatggctaatgtcaggtggccacgcaaatacccactggcaaacaactcatcatcactggcatggtcaaccataccgtcgattaatgccagaatgcgtgattcaaactccgcgatcatcttctttcctcattgtaaaacgtggcgctggctttagttgagcgcttccggccacgggaactgttccgccgtaagttccggcgtgtgataataattttgtagtgctttaatgaagcgtgccgggcgttcaggaatgccgtttgctaggtaatccatcacctgcgcatgtacccgccgttgaaacaccacacgatccggttcgaagtcgccttccagattgtcgcaactgacgttaaacggatatcccgccgccacacagaacaaccagtcgagtgcctgcggcttcacttcaacatcttcaaactggctttgcgtttgggcatcacgcccatccgggcaataccagtagccgaaatcaaccagctcacggcgcgcttttccggcaatacaccagtgcgaaatctcatgaattgcgctggcataaaagccgtgggcaaagacaattcggttatacggtacttccgcatcagcaggaagatagatcggttcgtcgtcgcctttaatcagacgggtattaaattcatcggcaaagcagctattaaaaatttcaatcaactgctcatagtggtgtgtactgttcattagttcatccccaaccagtggaggatctcctgtccgtggctatcgtaaagtaatttggcactcatcaccgccgagacgataacaatcatcgggcggatcagcttttgtcctttgctcaacaccagccgtgaacccatgcgcgcgccgaggaactgccccaccagcatcacaaagcccgtcgcccaaatcactttgccgccgagaataaacagcagcagaccgccaatgtttgacgttgcgttgagtaatttggcgtgagccgtggctttggcgaggttgaatccgcacagcgtaacgaaggccagcgcgtaaaacgatccggcagccgggccaaagaatccgtcataaaaaccgacgcagccaccggcaattaacgcgaagggtaaaccgtacatccggcgctggcgatcttcttcacccagctttggcatcagcaagaaatagaggccgatacaaatcaccagaatgggcaaaatctgccgtaagacatcagcctgaacgtactgtaccaacagtgcgccgctcattgagccgacaaaggtcatggcaatattgagtttctgatcgcttaaactaaccactttgcggcgaataaagtagatagtggcggaaatagagccgccgcaggcttgcagtttattggttgccagcgcattagcgggagacatccccgctgccatcaatgccggaatggtgagtaacccaccgccaccggcaatcgagtcgataaatcccgccagcatggcgacaaaaaagagaactcccagcaacagcggggaaaccataaacaggctattaaacgtttccattagatcacgtgctcatccagtagcgcctggcaggaaggcggcaacggagacggtgtcttcttctcaggctttgttgttcccggttttggaggtgcaaaccagctttgcagttctgccccgcaaccatcgcctggtggcggtaaaggttgatcttcacactccagactatcggcaggacaacgtaatcgtacatgcatatgcgcgcgatgctggaaccagggtcgcactttgcgcaaccagtcgcgatcggtgcccgcatcaaggcaaagttgttgtttaatcgccggattaacaaaaatgcgtgtgacgtctttgtcctgggcggcgagtttgatcaagctgaaaatttctggcttccacagcgtggagacaacgtgtttaccgtcgcgggaaactaagtccagtgcttgcgggcgcaagagctgcgcggaggtccagcgagttttcggcagttgcagaaagatatcgacatccagtccggtctggtggctggcatgaccgccgttgaaacgcccaccagcgggcatccccatatcgccaatcagcaccgtacccatgcccagattgctcacctggctactcagacgctggataaacatcaccagatccgggtgaccgaaatagcgacgctgatcggtacgcatgacctgataatgttcggactgtatcggcagcgtgtcagcaccgacgatacagccattagaaaaactgcctatcgattgtgcgctacccggcacaggttgggttattttttgccacggcgtcgctgccaggctagcgctactggcaagcagagccagcagcgcaatcgcggttttgttcattttttaccagcgtggaatatcagtcttcacatcggcattttgcgcccgctgccgtaacaggtgatccattaaaacgatcgccagcatcgcttcagcgatcggcactgcacggatcccgacacagggatcgtgacggcctttggtgatcatctcaacttcttcgccaaagcggttaatagtgcgccccggcacggtaatgctggaggtcggtttcagcgccatatgagcaatgatttgctgcccgctgctgataccgccgagaatgccgcccgcatggttgctctggaaaccgtctttggtgatttcgtcgcggttctggctgccgcgcagcgccactacgtcaaaaccgtcgccaatttccacgcctttcaccgcgttgatgctcatcagcgcatgggcgatgtcggcatccaggcggtcaaagaccggctcgccaagtccggcggggacaccactggcaacaacggtgactttcgcgccgatggagtcgccctcttttttcagcgcgcgcatcagttcatctaacgcgtcgattttgtcggggtccgggcagaagaacggattttgttcaaccagcgaccagtctttgatttccagcggaatgtcgcccatctgggtcaagcagccgcggatttcaataccaaatttctcggcgagatattttttggcaatcgcccctgccgccacgcgcatggcggtttcgcgggcggaagaacgtccaccgccgcgataatcgcgcagaccgtatttttgttcgtaggtgtaatcagcatggcctgggcggaaaacgtctttaattgcgctgtaatcctgagagcgctggtcagtgttttcgatcaacaagccaatgctggtgccagtagtaacgccttcaaaaacaccggagagaattttgacctgatccggctcgcggcgctgggtggtatagcgcgatgtcccagggcgacgacggtcgaggtcatgttgcaggtccgcttccgtcagcggaatgcctggcggaacaccatcgacgatgcagccgagcgccagcccatgcgattcgccgaaggtggttacgcgaaagagttgtccaattgtgtttccagccatcacggctccgttattgttgtgtttgcgtgtttacttaatctttataaatcgcgaaatattcacgggccgccagcagctgctctttggtgagcataaacacaccatcgccgccgttatcaaactccagccaggtgaacggaacatccggatattgttccataagatgtaccatgctgttgccgacttcacaaatcaacacgccatcatcagcaaggtaatctgccgcgtttccaagaatgcgacgcgtcagtttaaggccgtcggtgccagatgccaggcccagttccggctcgtgacggtattcgtttggcaggtcggacatatcttccgcgtcgacatacggcgggttagtgacaatcagatcgtactgcactttcggcaagtcgcggaacagatcggaacgaatcggaatgacgttgtggatcagaccgtgttcttcgatgttctgttcggcaaccgccagcgcgtcgggagagatatctaccgcgtcgacttccgcttccgggaaggcataagcacaggcaatggcgatgcagccgctaccggtacacatatctaaaatatgctgcggttgcttgctgatgagtccggcaaatttattgttgatcagttcaccaatcggcgagcgcggcaccagcacgcgttcatcgacgtaaaattcatgaccgcagaaccaggctttgttggtcaggtaagccaccggaatgcgctcgttgacgcggcggatcacgcgttcaacaatacggtgtttttcgctggaggtcagacgcgcggtgcgcatatcttccgggatatccagcggcagatagagcgatggtaacaccagctgtacggcttcatcccacgggttatcggtgccgtgaccgtaccagatatttgccgcgctgaagcggcttaccgaccagcgcaacatgtcctgaatggtttgcagctcatttactgcttcatcaacgaaaattttatccacgtattcctccagggcatgatcgcaataatttcggcggctagtttgccatgaagatgacgataaatcagcattcacgcgcggtgagtgaggaaaaatacgtttaaaacgatcgattgtgctacgagtcgggtaaactgtaggaaaattagaaatagagacagataaatgaaaaagaaaacaacacttagcgaggaggaccaggctctgtttcgccagttgatggcggggactcgcaagattaagcaggacacgattgtccaccgaccgcagcgtaaaaaatcagcgaagtgccggtgaaacgcttgatccaggagcaggctgatgccagccattatttctccgatgagtttcagccgttattaaataccgaaggtccggtgaaatatgttcgcccggatgtcagccattttgaggcgaagaaactgcgccgcggcgattattcaccggaattgtttttggatttacacggtctgacgcagctgcaggccaagcaggaactgggcgcgttgattgccgcctgtcgccgcgaacatgtgttttgtgcctgcgtgatgcatgggcacgggaagcatattttgaagcaacaaacaccgctgtggctggcacaacatccgcatgtgatggcatttcaccaggcaccgaaagagtacggcggtgatgcggctttgttggtgttgattgaagtggaagagtggttgccgccggagttgacctgaatgctggcagcaaatgccggagcagcgtaaacgccttatccggcctacaaatatgtgataattcaataaactgcaattcacttcgtagatactgttatggcctgcaagttttttcctggtccggtttcccggattgcaggcatgccagacacagcgccgtcaggcgctgtttttttcatcccttccgcgatttttacgccgctaccggattatgccgtgacgcatcgaacggcacgcctgacttcagcactccatacgccacctgtgccagcttgcgcatcatcgcgccgagaatcacctttcctttcttgccattagccgccagacggtcgcggaacgcccgtccccactcagtcttactggtggctaccattgcgggcatatacaacgccctgcgaagcgacacatgtccggccttactcatccggctcgcccctctcacactgctacctgattcataacgccgtggtgtcagacccgcaaaagcggcgaactgtctggcatgggcgaagcggtccttcagaccgatataagccagcaataccgcagatgttttctctccgatacccgggatgctttccagcagtttcctgcggtgtttcatatccggatcatcgtctgtcaggtcttttatctgcttctcaagacgcttcagctctgcttcaagccacagaaggtgagcatcaatgctcggtctctggacttcccgcgccgtttcagtgcgattcagttcctgcgtgtgcatatctgtcagcgcctggtggcggactaccagggcacgcaacgcgcgttcaagcgggtgaggcgcttcccaggctgcagggcgcttctgacgacagaactctgccagcatgcgcgcatccacggtatcagtcttgttacgcagtccttcactctgagcgaaagctttacccagcgcaggattaatgactgacactatgtagccagcatcgtaaaggcactcagcgacaggttccatataggtgccggtcgcttcgatgcagatatgcgcatggtcaatcttgtgacctttcagccagctcaccagctcatcgtgccctttagtggtgttagcgaattttttggtgcgatgacgaccatcaggacgcaacacatcgacatccagtttctctttagcggtgtcgataccgatataatgaagttcatgttccatagtgaaaccaaccttgcaaatacggattaccgggaaaaccggtccatgatactgtccggtttatcactttgggagaaaggcagtccgctgcataaatctacgcaacaggttagaacccaaggcccgatacggcatgcggactgcaggcagagaaaactggccgattttctctgcactggagggataatacaaggcctgataagacgcatcagagcaatactacgaactacagttcattcaatacatactgaaaacgacacgtcgaatcaatcggttgcccactactggtattcacattcaccacaatatcgtgtagtactttatccgttaccggatgacgagttggcgtaaccgttaccgttgatttatcacaaccgtaagaggtaaaggttaacaattctgataccgcgcggcagtatgctcctctgccatcattatcagaaaattactgccatcacagagtctgccgccttccatcaagtaggtcgaaagcgtggtggtcactgttgaccccgtggactgaattcgtaacgccttattatggctgacataattttcactccaggagatatcgtatgaagcgaccggtatcgttgggcatattgtgttatgcactgtaggggccgtatagcttccaaatccgggtaaatctgtataggaataaaaggatgcgatccaagggcaaccataatcatcagatgcaacggtaattttaaacgtcatatatgcacaacgaaaaattttcgtatctatgccagggcaatttgagttattaattgtatcaaagtcagtcagtaccaaagttggagctgaacccgacccagaccaggaaataacccgcaacgtatcgcctttatacgcaaaagaatcatatttcccatatgcaacctcctttggcgttatcaccgtaacattgaaaacactgctcgctacagcaccggttaccttgtccatggcataataaactctcacactgtcaaaactcgcactcataagtttatctccagcataactcttagatgcgccgacaacactcagaacgagcagcattaggctcgcgaaaattatggtccattttttcatttcagaaatactcaaaggttgccgtcactgtggcactaaagtctccggacgttacatctcgcccgctctttgcctgtaaccaggtattaaaatttaggctgttatttccctgattcagcgggagcgtgacgcctgttgtattgttgattggcaccgatgtgcctgccgcagtttcaataccaatcccagcgccggatgctgatgacgaggagtcaaaggccagaaagccgggtagagcactatcttctgttcctgtcaacgttactttgacattaaacaatgtagaactatgacaatctttcaattgaaacaccaatggcactcgctctgactgcccaaggttcattaaatcgctggcggcaatggcaggaaaatgtacttctgccaactggctaccattaatcactggcgtacacgatttactgattaaattgccggtaaagtgcaaattatctcctgctattgtggttccactgcccagcaacatcaggctactaataaaaaacaacgtacgctttttcttcattggtaatctacctgtaacgtggcccaggcctcaaagtccgcctctggcagaacgacaccactcttttttactggcacagccgttaacaccggtaaatcggtttcattcaccacaagtggcgtattgatcgtaaaactctgccctgcctgtttgagctgaatgcctaaaccagtgatattgctgcttactgcagcattatcaaaatcgcttggtgtgccactccagctcaaggtcatttccattaatgggtcgcgaaccgccgtatcgcaggtaatggaatacggcacggtttgctcataattgctgccattaatgtcatcaataagcacatcctgaaaagttatttcaatggtttgagcgttgctaatcgtgcagttaggtggctgcactaaataaccgtgaaaagagacgtttgagagtgccatcgagcaaaagccccacagcaaaataagcgagatccgtttcattggtaatccaccacaattgtggcactggcgttaaattcagctgccgctaacgttgtaccactctgtttcaccggcacagcttccagaacgggaactcccgaggaaaaattaaatggcaaccatgagccagaggttaagtcgagtattgtgtgatcactacttttctgaacccgaataccaaacccaggaatccccgtgctgataactgtttcaccgttaatcacgaccgttgtcgcctgcatctgtagacgcaggtcatccattgccagattgttacaaacaagcgagtagtcaatgggacgtttataatcaaccccattgatcttattaatgaatacattaccaaactcaactgccgcaccatttaccgtacaaggaggaggggcatcgacaagcacccgtaaattcatacttactgacttactcgctgcaactgcaaagccgctaccaacacaacatatcagtaacccagttaccgcccagacagaacaagatcctttcatactggctctcccggcctcagcctttgcggctctgctcttcatcgacctggcaactgttaccgttgcaagtgaaaaagagcggcatccgagcgccatagtcgttgacataggtcagtaccggcacgctacccatcttcacattcagcggtgcagaggttttcggcgacatcactattggcgagaaaccggctgccggattgccatttttctgtgtgctggcattactgaaaatgacgtaatacggtgtcgggttattgacggtaaattcctgaccgttgcgggttaaagtaaccttatattgccaggggtttttcatgctgacgttctccagcgccttcggtcgccagaacaacttaatacgcgtttgtagtgctatttgcagcgtgttggctttgtttgattttggcgggatctcacgcacgttgaagtagaacaggctttcacgatcggcaggcaatttgttgatatccggcattccctgcacttttacctgcccgttcatcattgaatcgatgcgttgcaccggtggcagaacagttaacggtgaactgatcttgttacccttttcatcttcgatccagctttgggccagataaggcagtttcggatcgttattgcgcaacgtcacgctgattgatttgtcgctttcattaaatatcaaacgggtacgatctggcgttacagaagcctgggcagacaaactggcagcgctaagcagtaacgctagcgtcgtagcacccaatttggcagagcaaagtaaatcagacatggatcattccttaatcacgttattggttagctgaaacagaaacagggggattggtgggtgtcacctgttgcgtctgctcctgaatgacaggctttatgtcatcaggaacaaccggcgcgacgttgcctttatgctggcatggcagtaacaagccgttaaacagatcggcaggcagcgggtccggcaggttgatatcgcaatgcgcaacaccactccagaacacactcatgtgttcgccaggtttcaccccagccagataaacattgccgtcatcatcgacaaggcccactgtctgctcgttatcattttttacttctgcgccaaacggaggatggctgccgtcttgtaaacgcagcaccgccatcgctttttgaccactgatgacggcaaatttgcggtagccaatggcaccttcagttagcgtggcttgcaccaccgactgggttgcttcagcgttttcaggcaatctgttgaggtcgatatacgcctgattgcggtaatagttattgacgtcagaaacgacggctttaccaaacatattggtataaacagcagccccgttaccttccaccggaacatcggcaacgccatcggcatcaatcaacaagcgtgtcccgcccatattctgggtacggtgaagtgcgccaccgtgggcagtaagcgttgcgccgccctgtaacgacaagcccgcagaggtgtattgcccttcatggtagttcgcactgaggtcaacctgcgccagcgaaccatcatggctgtaatagccgtcaacgctggtgtgtttgtcactggtgccgacgttcaactgatagtgagtcgcgtcatcgacacggctgaaataaccgacctgactgctgtccgtcccactgccatagttaccgttatagctaacggtactgttgtcgccccacggcatactgagcgaaatgtacatgcctttgtcggcctggttgtcatactcgtaacggtagccagtcatcgagatgctgacattacgaatactgcccatattgaaatagtgcgagagcatgatgttgtagtttgtctgctcctcgcgatcccagtaggtatggcgggtatagttgagataaaccgaaacacccgcatcgcggaagttctggttataagtggcggtgtacatctctttgtcgttgcccgtgcgtaccattccgctgtcactggcatccagatactcactcatggtcataaagttctcttccgagaagcgatatccagcaaaagtaacgcggctgttgagctggtcaaagtctttggaataactcacacggaaggagttaccgtccagcgaacctttgccataagcggtgtctttatccagtttggtgtgcgagtgagtaacatcaaacgcgaccgcgccgaatgtagacaaatcgcgaccgacgccaagcgccgcagactgatagttttcatctcccagtgcgccgccatataacgaccagccgttagcgatcccccaggaagcttcagcaccagaaaaaaattcaccctcgacatggtgtccccactcttgcggacggcccatcatgatcttatagcgaacctgacctgggcgagtgaggtatggcatcgaggcggtgctgatgtcatattcctgcacctggccgttctgttcttcaatgcgaatatgcaacgtaccggagacagaatcaccaagatcctgaatacgaaacggtccagccggaacctgcgtttcgtaaatcacacgccccatctggctgacggtcacttttgctgtggtgtgtgccacgccggaaatgtctggcgcgtagccgcgcagattgggaggcaacatttgatcgtcagtactgacactgccaccaacatagttaaaaccatcaaaaatatcggatctgaggtaatcctcgcccagcgccagtttggcttttaatgatggtaacgcccgccaggcatagtagcgactccactcccatttttttgagtttcatcgccgctgaattcatcgtcatcattactgcgagtatgttgatagttagtctgccagtcagcacgcatacgccacggccccaggttaaccccgaccgtcccgttgccgctgatctcgttactatcatcaccgccattttcttcgtgccgggtttgtgcgttgatgctgtagtccgcgacgatcccggagatgccgtcatcccaacgtgaaggcggatcccagtcgggataagtatattcgaggtaagcctgtggcagtgaaatgactaatgcggactggcttaaatcagccttaatttccatgccttccagttgaccggatttcaggcatttagcatcgtggctccattgcagattgttcgccacgtcttcttttaaaccaaactgcgctaccagttccggtgtcagacaagcatagcttttgctcgcgtcatcttcaccagcataccagtaaatatcgtactcttccgccaatggctgtttatttagttgaacctgtaaattgtattttccgggctcaacatatccctggctggaaaaacgcttcagatcaatttttgtgtcgccttttaattccagaaaacgggaatcaaactgaatgtcgtcttcagcccagacactgctataactccctgacattgccagcgcaatgcaccacggaagaatccgtaatcgaaaaagagaatggtcaggcatacacgtttctatccgtttttattcttgttcggtcaaaatccatttaaatcccccatagcagtgtcgctatgggggtatgccttacaggtaagtaatctggaaggtggtatttgcttcgaaattacccagatctggcgcatcagctgcgccgaccagccaggctttaaagttcagtgtctgcttcgctttgcctttattggtagaagtgtctttcactattttctggtcaatacccatgccgcttttgtaagaggtacccagagagtcaccgatcgccaggctaacattgttaaatgccgcaccggtatcggtattgaaaatggtgtaataattgccgctatttgcagaagaaacggtaccagtaaaggtagtggtcattgtttcctgagtatcaaatacgcaatcttgcagacgaatctggaaacttttcggcgtggtggtgccgttatttttcagtttttcggcaccgatatcacccatatcaacttccagtttgtgatcgtccggaacgatagaacacactgagtcttcaatggtgccgtaaaaacgtgcagtaccgttgttacccgcagcgattgttgccgtagaggtgaaaacgcccatcaccattgccgcagcaatagctgttttaacaaacttactcattatttgtccttaaactataaataattaaaaatataaacattacaatacattgattcagtcaatacccaatgtttatacccagccattgaatacggcatgcgatccaaaaagaacaggtcgtagaaaattgtattctttggtgtggggccgcatagtgatgttttcacccccctgatgcaatttaattttactaaagagtaaatgtagatttaattaatatattgacagaagaaaggttatcttaaggacatccttaaaaaatacggaataagtatttagaaaaaatagaaagtatatcaataatgaatatcaacagcttaaaaaacaaacaatgaacatataatgcgattggcatttatccacttttgacaatataatatataaacactatagccagaatttaatcaagtttcaattacatcctgcctgattattcaactctattatctgtattaataaatgacaatgagtgtcaaacagacattattcatttcaacatgtaactttgggcaaaatcaagatacgcgcagaagaataatttccgaatgaatgtagaaagtgttttatttatagataaggagagtcttcgatagtagtgaggttgacagatatccgctgcctgatgagcaattatgcccaatgaatctacctcattgggcataatttggaacacatcagatagcttttgccatcttcagattacacgggctcatctgccagttgaatgtaccgtttccgctttcatcaagcgttacgctggcaatggccgaggtggtaaacataggcggcgtttcgcccggacataactcggcaaccagatacccgactaacggtaagtgagagatcaccagtaccgaagcaacaccttcattggtcaacgcctgcaaataggcactgaccagaccaacatcgccgcagggcgttaactccggcagaacttctgcactggaaggcaggttcagacaatcccctacttcttccagtgtttgctcggctcgcaggaacgggctcaccagaacgcgttcgatttccactttttgacctttcagccagttcgccatcaggcgagattcgtcacaaccattagtggtcagaggacgaacggaatcactggcggcatcgagggctgcgtcgccgtgacgcatgataaaaacttgcatattgcaccgcttttgttaaccagattcgcccgttttctttcatctgaaaccagagaaagaaaacggtggccggcattgtgccttatccattcaccgaatgaaacgctgttttttacctcaatggcgtaagtatagtcaatatgcgtttacattttgaccaacactccgccattcagcgcggattcatatagctttgaccttcttattgcaggtcagttgcagttgttttccaaaaactttccccacgcgcgcccatctcgaccaaacgctcgcaaggggtaaaacgggaaccatactgcgtggcaagtcgttgcattattgcaaccacttcgcccgcgccgagagaatcgatatagcggaacggtccaccgagaaatggcggaaaaccaatgccaaataccgcaccaatatccccgtcacgcacgctacggataacctgctcatcaacacaacgtactgcttcattcagcatcaacatcacacaccgttcagcaacctgcggtgcggagagtcgcccctgcccttgtgcgccaatgagcgggtaaatggcgggatcgacctgttttttgcttttacgccctttctgaccataaagatagaaaccccgaccattttttctgcctttgcgatcgtcgttcaaaattgaagaaacaacatttgcaggcgcgctaaaacgttctccataagcggcttccagtacaggaataattttagtcccggtgtcgattcctacctcatccaaaagttggattggacctaccggaaaaccaaatttcactagcacggcatcaatgtgctctacccgttcaccttcggtcagcatgcggatagcttcattaatgtaaggcgctaagatgcgattgacgtaaaacccggctttgtcacgcacgacaatgggcgttttgccctgttttttcgccagttttaccgtagtggcgatggtttgcgctgatgtacccgcatgaggaataatctccaccagcggcattttttccaccggactgaagaaatgcaggccgataacttgctcaggtcgcgtggcgtgagcggcgatatcaccaatcggtaaagatgacgtattcgaagcaaagatggtatgagcggcgctattttgctcaacttccgccaccatctgttgtttcaattcgagattttcaaacaccgcttcaataatcagatcgcgatgggcaaagccgcgatagtccgtcgttccggagattaatgccagctgtttgtcacgttcgctggctttgagatgacgacggcgaactttgccctccagctgatcccaactgtacttcagcgcatgatttatgccctgcgggttgatatctttaattctgaccggaagccccactttacaagcagtgacataagcaataccgccgcccatcaagccaccacctaaaattcccacgctgtttaatggcgcaggcggtgcatcactaccgggatctttcttcacgtccgtactggcaaaaaagatactacgcagcgcctgcgattgtggcgtcatcgccagttcgccaaacgcccgagcttcggcgtcataaccgctgctggtgccctgcgctaatcccgtttcaacaacctccaggatgcgttctgtcgccggataattgccttgagttttgtgttctgttttcttgccgaccattttgaacagcagcgcacgacctaacggccccgccagaatacgctcgcgtacaggtagagggcgggaagatgggcgatccttcttcgccagctcaacagcgacttccagcaaaatggagtgcggaacaacgtcatccaccagccccagctttaatgcctgtttcgcccgaagttgttttccggtgaggatcatctctaatgctgtgctgacgcctatcagacgcggtaaacgctgggtgccgcctgaaccgggtaacaatccaagttgtacttcaggcaaaccgagcaccgttttaggatcgtcagtacaaacgcgaccgtggcacgccagcgccaactccagcccaccacccaggcaagcgccatgaatagccgcgataaccggaatgggcaaagcatgaatctccgccatcaactgttggccctgccgcgccagtgcttccgcttcttgcgccgttttgcagttgccgatcatgttgatgtctgcgccagcaatgaagttgtccggtttagcggagacaaacaccacgcctcgcaactctttgttttcacggagttgcttaataatggcgcgcacctgcgaggcaaactccgccttcagggtattcattttctcacccggtacgtcgatggtgataacggcaatgttgtccagacgaacattaagggtaaacgctgatgtcatttccattattccgcctccagaaccattgccgcgccaagcccaccggcagcacaggcggtaactaaaccaaatccaccgccgcgacggtgaagttcatgcaatgtctgggtaatcatccgcgcgccggtcgccgcgaagggatgcccgtaagcaatcgaaccgccaagcacgttaaatttgctatcgtccacttcgccagtggcatgtgcacgccccagtacttcacgagcaaaacgttcgctgcccagcaactgaatattcgccagtgtctgagcggcaaaggcttcgtgcatatcgatcaatgtcagatcgctcatcgtcaaaccggcacgctccagcgccagcggtgttgaccaagccggaccgagcaacatgtcctgccagacatcaatcgcagtaaatgcgtagctgcgcagataccccagcggcaccagccctaattctttcgctcgggattcagtcatcaggatcaccgctgccgcgccatcggtcagcggcgtactgtttgccgccgttaccgttccgtgtttacgatcaaacgccggacgcagctttgcgtaatcggcaagcgaggaattaccgcgaatattgttgtcttcgacaagcggttgtttataaggagggataaaggcagtcatcacctcttctttgagttttccgtctgaccatgcctgagcggcacgctgatgcgaacggtgcgctaatgcatcttgctgttctcgggtgatgccgtaggttttcgccatttgttcggcggtgtcgcccatccgcaagccagtagaatattctgctaccgcaggcggtacgggcattaagtcgcgcaaacgcaggcgagagaagagtttcaggcgctggctcatggttcgagctttgttgacatcaaccagcacgcgcgccagttttttactgacgccaattggcaatacggaagaggaatctgccccaccggcaatccccgctcggatagttcccgccatcaggctttctgcgacgtttgcaaccgcctggaaactggtagcgcaagcgcggctgacgctgtaagcatcggtatgcacattcattccggtaccgagaacaatttcacgcgcaatgttgggggcttcaggcatttgtacgacctgaccaaagaccagctgttcaatcacttcagcggggatctcgctgcgtgccagcagttcgcctaccaccatcttccctaaatcaaccgcgggaatgccatgaaaagccgtcccctggcgggcaaaaggcgtacgtaaaccgctaacaatggcgatacgatcgccctggcgggtaaccagcggtaaaacctgacccataacactcccctgtaaaaaaataaataaagtggtctgacctgatcatagtcttaaccatttttttacatttagccaaacggagaaaaaagaaagtgggagctatgacacagtgaagacaggagaaagaaaagaaaacgcccctgccagcaactgacaggggcgaacgtacccgagaggaattaacgcagacccagctggaagatcagcatttcagcttcgcaggcaaaagtgaaatcgatatccaggcgcacaccgtcagactcttcagtgaaagtcggggagattttgcacggttcggattccacgctacgggctttttcagtcagcgccgccagcgtttgttctgcttctgcgcggtttgcaaacacgcggctgtaagacgcggtgcagtcggagttgtccataatggtgccaacatccatacagcagcaaaccggggtttcatcagcactacatttactcatcgttgatttcctctgtatgtgcacccaaggtgccagataaacgttgtggatattttacgcttccggaaagtgctgctccagttgttaattctgcaaaatcggataagtgaccgaaatcacacttaaaaatgatctaaaacaaaattcacccgaatccgcgagtgcgcaacctccaaattttgccagctggatcgcgtttcttagatcatatttgaaaaaagatggaaacatacttgcaacattccagctggtccgacctatactctcgccactggtctgatttctaagatgtacctcagaccctacacttcgcgctcctgttacagcacgtaacatagtttgtataaaaataaatcattgaggttatggtcatgagccagaaaaccctgtttacaaagtctgctctcgcagtcgcagtggcacttatctccacccaggcctggtcggcaggctttcagttaaacgaattttcttcctctggcctgggccgggcttattcaggggaaggcgcaattgccgatgatgcaggtaacgttagccgtaaccccgcattgattaccatgtttgaccgcccgacattttctgcgggtgcggtttatattgacccggatgtgaatatcagcggaacgtctccgtctggtcgtagcctgaaagccgataacatcgcgcctacggcatgggttccgaacatgcactttgttgcaccgattaacgaccaatttggttggggcgcttctattacctctaactatggtctggcaacagagtttaatgatacttatgcaggcggctctgtcgggggtacaactgaccttgaaaccatgaacctgaacttaagcggtgcgtatcgcttaaataatgcatggagctttggtcttggtttcaacgccgtctacgctcgcgcgaaaattgaacgtttcgcaggcgatctggggcagttggttgctggtcagattatgcaatctcctgccgggcaaactcctcaagggcaagcattggcagctaccgccaacggtatcgacagtaataccaaaatcgctcatctgaacggtaaccagtggggctttggctggaacgccggaatcctgtatgaactggataaaaataaccgctatgcactgacctaccgttctgaagtgaaaattgacttcaaaggtaactacagcagcgatcttaatcgtgcgtttaataactacggtttgccaattcctaccgcgacaggtggcgcaacgcaatcgggttatctgacgctgaacctgcctgaaatgtgggaagtgtcaggttataaccgtgttgatccacagtgggcgattcactatagcctggcttacaccagctggagtcagttccagcagctgaaagcgacctcaaccagtggcgacacgctgttccagaaacatgaaggctttaaagatgcttaccgcatcgcgttgggtaccacttattactacgatgataactggaccttccgtaccggtatcgcctttgatgacagcccagttccggctcagaatcgttctatctccattccggaccaggaccgtttctggctgagtgcaggtacgacttacgcatttaataaagatgcttcagtcgacgttggtgtttcttatatgcacggtcagagcgtgaaaattaacgaaggcccataccagttcgagtctgaaggtaaagcctggctgttcggtactaactttaactacgcgttctgataacacgttcgcctggataaagtcacctgcatagcaggtgactttaactcccccacttcaccgaaagtagtgtcctcattgcttacctcctgagttttgcaaacagcctgatggcagcttgccctttcaaatcaataagcggtatccacagacaaatctgaagggaaaggcatattttcaggcgttctgctcgtccttctcaaagagtttacttttctgaatttccaggatactcaccccccctggctattgtgcgctcatacactcaaattaaagataggttctaaataaatgagcgttttttgatagtctatttcattaggtaatatatatttgtaacaaatcaatcaaaatggaataaaatcatgctaccatctatttcaatcaacaataccagcgcaacttacccagaatccattaatgaaaataacaatgatgaagttaatggattagtacaagagctcaaaaacctttttaatggtaaggaaggaataagcacctgtattaaacatctacttgagcttataaaaaacgccatacgagtaaacgacgatccttatagatttaatattaataattcctcagttacttatattgatattggctccaatgatacagaccatattactattggtatcgacaaccaaaaaccaatagaattacctgcgaactataaagacaaagaactcgtccgtactatcattaatgacaacatagttgagaagactcatgatatcaataacaaggaaatgatcttcagcgcattaaaagaaatatatgatggagatcctggttttatcttcgataagatatcacacaaactcagacatacggtaacggaatttgatgagagcgggaatagcgaaccaacggacttatttacctggtacggtaaagataaaaaaggcgactctctcgctattgtaattaaaaataaaaacggaaatgattacttatctctcggttactacgatcaggacgactaccacattcaaagaggaattcgtattaatggtgatagtctcacccaatattgtagtgaaaaagccaggaatgcttcagcgtggtttgaaagcagtaaagctatcatggcagaatcatttgcaacaggttccgatcatcaggttgtaaacgagctcaacggggaaagactgagagaacctaacgaagtttttaaacgtttaggtcgagcaataagatataattttcaagtggacgatgcaaaatttagacgcgacaatgtaaaagaaataatttctaatttattcgctaacaaagttgacgttgaccatcctgaaaataaatacaaagactttaaggatctcgaagataacgttgaaaaaagacttcaaaatcgccaggcgaaatatcaaaatgaaattaatcaactatctgcgccaggtgttaattttgatgatatttaaaattatttttccagttttttgatttttcaacgcctgaatatcggaaatagtcagtgacgaacatcagtatttttacatcattacgtccgggtcattgtcggtttatctccttttacttgtggtaattgagggataacaacaaaaaaggtgagttttgcgactcaccttttttatttgtttcttattcagaatcaatatcttttaaatcatcctgaatcgcttgtgcgttcggattttcctgcggtttgagttcgccgccattagcgatgaaatcatgacgctggaagtacgcttcgcgcaccataatataaggatcggacgactgacgcagcagaccatcggaatccagcagctgagcgcgggtttcgatcccttcaagcgtccatttacccacagacatcggccaggtcagccaggaaagaaccgggtaaagaccatccgccatatcaccaccgtcatcacgcagcgtgaagctaccgtagaacggtaactggacgtaaggcccataacccacgccataatgaccaagcgtactaccgaagcggtgaggttcagtccgttgcagtttcgggttcgccatccctgcaacatcaataaaaccgcccatccccaaaatggtgttcaggaaaaagcgggtaaagtggaccatcccctgataagggtcgccctgcaagaagtagttaaccatcaccgcaggttcttcaaggttgccagtaaagttgctcaaaccgttacgcgccggttgcggaacataatcacgccaggcgacagcgaccggtcgaacaatatacgggtctaatacattgaagttgaagttgtacatggtgcggttgaacccttctaacgggtcagaacgcccttgctgatctgtaccggaactcgcacaccccaccagaagcgtagttcccagagcaagcgccgacaggcgaagcttcataaatgtctccctgttttttatggcttatgcagtttgccatccatgacggaacgataccgtatccgcctgtttaggtgtgggcgattgtaacagcacgtcaactgatgtccagacgccctgatttgctgatttgatcatagcctggtaatcgccgccctgtaggctacttgattctatagaaacagaaaaaggcaaacgcagccttttctacattttcagagtaactcccgccagttgcgagcaaaaaagccgctacgctttagctatacgtgctaattcaagagaagagaccatggacaacgacaaaattgatcaacacagcgacgaaattgaagttgagagcgaagaaaaagagcgcggcaaaaaaatagaaatagatgaagaccgactcccctcccgggcgatggcaattcatgagcatatccgccaggatggtgaaaaagagctggaacgcgacgcaatggcgctactgtggtcagccattgcggcgggtctgtcgatgggcgcttcgctactggcaaaagggatatttcatgtcgaactggaaggagtgccaggcagcttcttactggagaatctcggttatacctttggttttattatcgtcattatggcccgccagcaattatttaccgaaaacaccgtgactgcggtactacccgtcatgcaaaaaccgacaatgagcaacgtcggcttacttatgcgattatggggcgtcgtgctgctgggtaatattctcgggacaggtattgctgcatgggcatttgaatatatgcctatcttcaatgaagaaactcgcgatgcatttgtcaaaatcggcatggatgtgatgaagaacacccccagcgagatgtttgccaacgcgatcatttccggctggctgatcgccactatggtttggatgtttcctgctgcgggtgcggcaaagattgtggtgattatattgatgacctggcttattgcactgggtgacaccacccacatcgttgtcggttctgttgaaatcctctatctggtgtttaacggcacgctgcactggagcgatttcatctggcccttcgcactacctactttagcggggaacatctgcggcggcacctttatcttcgcgttaatgagtcatgcacagattcgtaacgacatgagcaacaagcgtaaagcagaagcacgccaaaaagcagaacgtgcggaaaacattaagaaaaatgataaaaacccagcataaatggcgagggtttaagcaatcgagcggcagcgtacttaccccgcagtccattagcgggtatactcatgccgcattgtcctcttagttaaatggatataacgagcccctcctaagggctaattgcaggttcgattcctgcaggggacaccatttatcagttcgccaccatccgtactagtccgcaaaatcccctgaatatcaatccttccgtatattcacggttcgtcatggttcgcgtcagatcgttgacagccgcactccatgacgggtaaaaagtggataaaataattttacccaccggatttttacccatgctcaccgttaagcagattgaagcagcaaagccgaaagaaaaaccataccgcctactcgatggtaatggcctgtacctttatgtccctgtgtcagggaaaaaggtatggcagcttcgctacaagattgacggtaaggagaaaatcctgaccgtaggaaaatatccgctaatgactttgcaggaggcaagggataaagcatggactgcgaggaaagacatctcggttggcatcgatccggtaaaagcgaaaaaggcttcgtctaacaacaattcctttagtgcgatttacaaggaatggtacgagcacaagaagcaagtctggtcagtaggctatgcaactgaacttgcaaaaatgtttgatgacgacattttacctatcatcggcggccttgaaattcaggatattgagccgatgcaactgctggaagtaatccgcagatttgaagatcgcggtgcaatggagcgagccaacaaagcccgcagaagatgcggcgaggttttccgttacgctattgtcactggtagggctaaatataacccggcgcctgaccttgctgacgccatgaagggataccgcaagaagaacttcccgtttcttcctgcagaccagatccctgcattcaacaaagcactggcaacattttcaggaagtatcgtatcgctcattgccaccaaggttttacgctatacagccctcagaacaaaagagcttcgttccatgctatggaagaacgtcgattttgaaaacaggattatcaccattgacgccagtgtgatgaagggacgcaaaattcatgtggtcccgatgtcagaccaggtggttgaacttctcactacgctaagctcaatcaccaaaccagtatcagagtttgtttttgccgggcgcaacgataagaagaagccgatctgcgagaacgcggtgctgcttgtgatcaaacaaatcggctatgagggtctggaaagcggtcacggattcaggcatgaattcagcacgattatgaacgagcacgaatggcctgctgacgctattgaagtgcaactggcacatgccaacggcggatctgtgcgcgggatttacaaccatgcacagtatctcgataagcgcagagaaatgatgcagtggtgggcggactggcttgatggtttaatagtttaatagtttaatagtttaatagtttcagtccaatattacattttagcattgcaaacaaatattcactcacgcaacggttaattaagaagcaaccaagtaatcttagtgatgatgtttcagaatgatgagtaacaaatcgttaaatcaagtattcgatgctagtgttttgagcctctttagctgatattattgtcgtttactctactttacattgaattgtttgatgaccatgactacacgatatagatctgatattgatggcctacgagcacttgctgtccttcttgtttttgcttatcacctcaagctatcaccttttagtggcggctttattggtgttgatgtcttcttcgttatctctggatttcttatcactggtattgttataaaagctattgacagaaatagtttctcattatctgacttctttaacagaagaataaagagaatagtaccaaatgtttttttagttgcatcttgtacaattatagccggatggttcatcctattaccaaaggattattcttcacttattagtagctatttgtacacatccatctacgctgctaacttttatttttggaaagcgacaggagcttatttttcatcttctgcagatgagatgccactacttcatatgtggtcattggccgtagaggagcaatattactttatatggccaattattattttacttgcactaaagcacattaagacaaaacatattggtgttattacattaataatttcagtatttgcctttatattctctgaaataatggcaaggcgttacgctgggttctcatattatatgccaatcacacgctctggaggcttgcttctagggtccgccctagcattaatgaatagagattataaaaaaataagggagtttaattcttacatagtagtaatattaggaactattcttattgcggcatcatctgtaacagtgaacaaattatcagtgtttcctgggttaaattctgcgataccatcatttggtgcaatgttagtaattttaggggggaacgggtttaatggcaatgtgatatcaaaaatctatggttcaaaaataatatccacaattggattgctatcattctcaatatatctttggcactggccgttgattgcatattcaacatatatgggagtgatagactcacttgaagtcaaattgacaatagtactcctgacatttattttatcatatttaagtttaaaattcattgagaatccaataagaaaatcaaaaatatcatttgttcgttcttttatttttattaacacattttttattgcaactgcttttattgtgttgtttatgtcaactataacaaatggcttcaaattcagaagtgtaggagaaaatcataatttagatgtgaaatatgctggaatggacgaaggatggtgtcatgttagcgcagaaggaaaaaatggcataacttttaatgagtctatggccaaatgttatataggtgataaaacatcaaataaagaagctctatatattggtgattccaatgcagggcattacggtccatttgtagatgaaatgggtcgcagggctggaataaaaataaatcaactgagcacttcatcttgttacccaacaagagaagttaagaaagatggagaaaaccctgatgtctgcataaacttcagaagaataattaatgaaaaaataaaatctggtaaatatgatacaattatcattgctaatagatgggcaagggatgataagaatatgtcatataaaaacgctaacttcaccgagttcctatcattttactcatctcacgcaaagaaagttattattatggatcaaatgcctgagtgggtaataaatcccgctgcctgctacgagagaggaacatgtgatgctgaaactaattttgatctagcaccaggattggatgagtcgcgtaaaaaaatagaaagcgcagcatcacattttaataatgtttatcttgttgacccgtactacctaatgcttaagaataaaaaatacacacctttcgcaatgggataccctatgtaccatgacaatggtcatttaagcatcaatggaatgatgtggattgcggaaaaatacttgcaagataataaaaacccacttgaagattaattgagttataatttttattggtaatatgaacctcttaatttatgagaggttcatattttcattgaaatatttaattgtgctccttagcaaagcgcaagctacctgcgcttaatactgcagataacgtatctcccactctagtcacacttaagttgctagttcctgcaatgtaactaacagttgtcgttgttgccagtgtcataactattggtatagttatgactcgttctgtacctccgctatcaacaaactgaacagataaaaactgaaaccttctatttattttatatgaaaatgataatccagatatggataataaaccactttgtcctatttttatattccaatcagaaaaatcagttatgttagatgggtctatattattttgcgagtaccatgatgttattgcgcctgatgatgtttttcctttaaaataaacaaatgaactacttgcttttttaaaattattatcacatatgataaccacctcttgagttgatagtttagtttcatcatagaatgcgctggtaagtactgcgtcatctgcgttaacaccccgtatctcagaaatcttagtcacaccagccttgtcagtgtcttccgctttgtttatgagagagtctgtattgtttacccacgcagacagcactctagccacaggggtgttatactgacgcatcaattgcgaaacaccagagataatacctgcctttaaagtgatttcctggcaattgttgccgtaagcaaggattggtttattcaccccatcccatctataattgccaacttcaacatcaattcgtccaccactgcaccatacaacagcatttgtttgtcctccgtcaaacttaaccccataaacagcaccaactttaacaaaagcgtagcgttcggcgtttattttcatttgaagcgggttgttgctggttcccgtgacgtacccaatatctatacggcaattatctcctgcgccatctacgttaatgccgcggtggtcagatccaataaccccgccagagccgacaacgctacagttttcacaagtaaagaaaccaatagggttgttgttgtgcggtttagaatgaatggagttatattctgtacctatcttgccgttaagaatgtaggtaacatttttcataacagctgtaattgtgtagttattgccatcccaaaccgttgcatcagggttaagaaaatgtgcaaaggaccacatacccccggagtttaaccccataatttctggccctaccgtggggtcatcgtaacgccccataactgtaaccccagcttcgtggtgtatttctatattatctcgtaatggatgaatagagccaagaacataaaaagtacctgttgcaccatattcaaatttactgaatcttgtgtctcttaccagtttttgaattacattacggttatgcgcggcgtttagcggaacatattcaccttcaataatgccagcggaagcgaaattaggcgtcattaaaataagatacccaccaactgcagaaatataaaatataggtgactgtggtttttcagttgtaaacacccaatctgttacaactggaacattataataataagttctaacctttttcccatctgttaaccctaatattgattgggcctgttcaacggatgagcattcgagaatagcaccaccaacgataatgactcctgcgctcccctgtaattcttgccgtagctgatcaggatcatacttcaacacattcggaaaatagaactgctgcgaaccatacgcatcataaacagccatagaatggccttgcacagttacgaacttggcaatctgtccgttatatacaggataaccagcagcgttaatgatgattggttgcgaaacaggaacgtgagagccgtcttcgttctccacataaacctgaatctggttttcaggatttaccgggtcagtgtcaattttaccgatataaattttgccattggcaaccgctttaaaagaacgcgccatagtgaagagttgcgaaggcatgcttaccacaacatttgcggtgatatctgtcatttaatttgctccagatacaaggaatcgccgcagcatggctacggtgratttttgnngcatnnnnnnnnnnnn

SEQ ID NO: 592 - DNA, 176 bp, Escherichia coli
  modified_base (171)..(174): a, c, t, g, unknown or other
catgtttggcgggacagcgtggactcgaaccacgataagaaggttaacagccttccgtaatgacctttatacgactgacccaaataaaaaagccaccgttgcaacttaagagtcactaacggcagcttacctgctaatwttatggctmawttgctcaatgatgtcaacacnnnnta

SEQ ID NO: 593 - DNA, 25 bp, Escherichia coli
acatgtttaattttctctacacgtt

SEQ ID NO: 594 - DNA, 10 bp, Escherichia coli
  modified_base (1)..(2): a, c, t, g, unknown or other
nngaggtgag
